(19) United States
(12) Patent Application Publication
(10) Pub. No.: US 2024/0309451 A1
(43) Pub. Date: Sep. 19, 2024

(54) DIAGNOSTICS AND THERAPEUTICS FOR EBV IN MS AND OTHER AUTOIMMUNE DISEASES

(71) Applicants: THE BOARD OF TRUSTEES OF THE LELAND STANFORD JUNIOR UNIVERSITY, Stanford, CA (US); THE UNITED STATES GOVERNMENT AS REPRESENTED BY THE DEPARTMENT OF VETERANS AFFAIRS, Washington, DC (US)

(72) Inventors: William H. Robinson, Palo Alto, CA (US); Tobias V. Lanz, Redwood City, CA (US)

(21) Appl. No.: 18/267,038

(22) PCT Filed: Dec. 23, 2021
(86) PCT No.: PCT/US2021/065064

§ 371 Date: Jun. 13, 2023

Related U.S. Application Data
(60) Provisional application No. 63/131,581, filed on Dec. 29, 2020.

(51) Int. Cl. C12Q 1/6883; C07K 16/08; G01N 33/569

(52) U.S. Cl. CPC C12Q 1/6883; C07K 16/085; G01N 33/56972; C07K 2317/31; C07K 2317/33; C07K 2317/34; C07K 2317/565

(57) ABSTRACT

Compositions and methods are provided for diagnosis and treatment of individuals having multiple sclerosis (MS) or MS spectrum disorders. It is shown herein that EBV-transformed B cells, and particularly plasmablasts, are present in human MS spinal fluid. These cells produce antibodies. e.g. IgG antibodies, that selectively bind to EBV EBNA-1 sequences, including without limitation residues 386-405, and cross-react with the myelin protein hepacam/glialcam, including without limitation residues 337-385.

### CROSS REFERENCE TO RELATED APPLICATION

[0001] The present application claims the benefit of and priority to U.S. Provisional Patent Application No. 63/131,581, filed Dec. 29, 2020, the entire disclosure of which is hereby.

### STATEMENT OF GOVERNMENT SUPPORT

[0002] This invention was made with Government support under contract NIH:AR063676 awarded by the National Institution of Health. The Government has certain rights in the invention.

### INTRODUCTION

[0003] In Multiple Sclerosis (MS), autoreactive B and T cells cause tissue-specific destruction of myelin in the central nervous system (CNS). The presence of oligoclonal bands (OCB) in cerebro-spinal fluid (CSF) and the efficacy of B cell depleting therapies emphasized the importance of B cells in MS pathology, which act by autoantibody secretion and T cell activation during antigen presentation. Anti-CD20 B cell depleting therapeutics have emerged as efficacious therapeutics available for both relapsing remitting and primary progressive MS. Nevertheless, many aspects of B cell immunology in MS are not well understood, including their phenotypic and functional characteristics in CNS, CSF, and blood, and the degree to which autoantibody production vs. B-cell dependent T cell activation contribute to pathogenicity. Both mechanisms are B cell receptor (BCR)-dependent. However, the identification of dominant B cell antigens has been notoriously difficult in MS.

[0004] Viral proteins have been suggested to contribute to and even initiate inflammation by eliciting molecular mimicry to myelin proteins. Epstein-Barr virus (EBV) in particular has been associated with MS, as 99.5% of MS patients (vs. 93.6%-94.4% of healthy individuals) have been infected with EBV-often years prior to disease onset. Infectious mononucleosis and MS share the same major risk allele (HLA-DRB1*15:01), and infectious mononucleosis as well as serum immunoglobulin reactivity against EBV nuclear antigen 1 (EBNA1) are independent and synergistic risk factors for MS. Immunodominant MS-associated epitopes of EBNA1 have been identified, and candidates for molecular mimicry have been proposed, including anoctamin-2, but research has not advanced beyond the descriptive identification of EBV/CNS cross-reactivities in CSF and sera of MS patients, and fallen short on in-depth characterization of pathogenic epitopes and assessment of their functional relevance in-vivo. Further, the role of EBV in promoting the activation of pathogenic B cells remains poorly understood.

### SUMMARY

[0005] Compositions and methods are provided for diagnosis and treatment of individuals having multiple sclerosis (MS) or MS spectrum disorders. It is shown herein that EBV-transformed B cells, and particularly plasmablasts, are present in human MS spinal fluid. These cells produce antibodies, e.g. IgG antibodies, that selectively bind to EBV EBNA-1 sequences, including without limitation residues 386-405 of EBNA-1, and cross-react with the myelin protein hepacam/glialcam, including without limitation residues 337-385 of hepacam/glialcam. Phosphorylation of glialcam at one or both of residues S376 and S377 can enhance binding affinity. The cross-reaction with glialcam induces neuroinflammation and can exacerbate symptoms of multiple sclerosis. Elevated anti-GlialCAM serum reactivity is shown to be present in MS patients in comparison to healthy individuals.

[0006] In some embodiments, an individual is diagnosed for the presence of EBV-driven MS pathology, where the diagnosis may be combined with treatment according to the diagnosis. Without being limited by theory, it is believed that reactivation of EBV in B cells, including plasmablasts, drives pathogenic activity. Detection of markers associated with active EBV infection, e.g. in MS patients, is indicative of EBV-driven MS pathology. In some embodiments active EBV infection is detected in peripheral B cell populations. In some embodiments active EBV infection is detected in CSF B cell populations. Methods for detection of active EBV infection can include, without limitation, detection of EBV proteins on the surface of B cells, where such markers include, without limitation: BILF-1, LMP1 and LMP2. Methods for detection of active EBV infection can include determining the presence of transcripts associated with active infection. Latent infection is characterized by limited expression of viral proteins, apart from, for example EBNA1, LMP1 and LMP2. Active infection can result in expression of a broader range of viral proteins, including for example BILF-1, LMP1, LMP2, etc. Detection of such proteins or transcripts can be indicative of an EBV-driven MS pathology.

[0007] In other embodiments, an individual is diagnosed for the presence of EBV-driven MS pathology by detecting the presence of antibodies in one or both of serum and CSF with specificity for glialcam. In some embodiments, the specificity is for an epitope cross-reactive with EBNA-1. In some embodiments the antibodies detected are IgG antibodies. The determination is optionally combined with detection of active EBV infection. A variety of methods may be utilized for the detection of antibodies.

[0008] An individual diagnosed for EBV-driven MS pathology is optionally treated in accordance with the finding. Treatment to reduce the adverse symptoms can include, without limitation, targeting all B cells for depletion; targeting EBV-infected B cells for depletion; inhibiting EBV-transformed B cells; inhibiting the B cell activating functions of certain EBV-encoded proteins, including but not limited to LMP1 and LMP2; and tolerizing the individual for glialcam epitopes, e.g. cross-reactive glialcam epitopes.

[0009] Knowledge of cross-reactive autoantigens, e.g. glialcam, can be used to develop specific therapies and diagnostics for MS, in place of the non-specific immunomodulation that is conventionally used. The present invention provides an important candidate antigen for being involved in pathogenesis of MS; and provides a target for diagnosis and therapeutic intervention. Cross-reactive peptides also find use in tolerization strategies, e.g. to decrease pathogenic responses through altered peptide ligands (APLs), manipulation of dendritic cell responses, biasing T cell responses to non-pathogenic responses, and the like.

[0010] Depletion of pathogenic B cells may comprise, for example, targeting antibodies to markers present on actively infected B cells, e.g. target pathogenic EBV-infected B cells, e.g. by therapies directed to one or more of cell-surface EBV proteins: BILF-1, LMP1 and LMP2. Antibodies may be conjugated to a cytotoxic agent, e.g. tubulin polymerization inhibitors, e.g. maytansinoids (maytansine), dolastatins, auristatin drug analogs, cryptophycin; duocarmycin derivatives, e.g. CC-1065 analogs, duocarmycin; enediyne antibiotics, e.g. esperamicin, calicheamicin; pyrrolobenzodiazepine (PBD); and the like. In other embodiments, other targeted agents are utilized include anti-B cell antibodies, e.g. anti-CD20 antibodies, anti-CD38 antibodies e.g. rituximab; anti-CD19 antibodies; EBV-specific CAR T cells, and the like. In a favored embodiment, anti-EBV LMP1, LMP2 and BILF1 monoclonal antibodies, alone or in combination, are used to deplete EBV-infected pathogenic B cells.

[0011] Inhibition of B cells with active EBV infection may utilize, for example, inhibition of specific tyrosine kinase proteins. Such inhibitor include, without limitation, BTK inhibitors. BTK signaling influences antigen presentation on B cells and is essential to the production of antibodies, proinflammatory cytokines and chemokines, and cell adhesion molecules. Examples of useful inhibitors include ibrutinib, evobrutinib, PRN2246 (SAR442168), BIIB091, and other BTK inhibitors.

### BRIEF DESCRIPTION OF THE DRAWINGS

[0012] The invention is best understood from the following detailed description when read in conjunction with the accompanying drawings. Copies of this patent or patent application publication with color drawing(s) will be provided by the Office upon request and payment of the necessary fee. It is emphasized that, according to common practice, the various features of the drawings are not to-scale. On the contrary, the dimensions of the various features are arbitrarily expanded or reduced for clarity. Included in the drawings are the following figures.

[0013] FIGS. 1A-K: Phenotype and repertoire differences of B cells in blood and CSF. (A-F): Flow cytometry data. (A) Number of plasmablasts as % of all B cells in blood and CSF. (B) VLA-4 expression and (C) HLA-DR expression in non-plasmablast (red) and plasmablast (blue) in blood vs. CSF. (D) Representative flow cytometry data (patient MS37) comparing HLA-DR expression on non-plasmablast (red) and plasmablast (blue) in blood (upper panel) and CSF (lower panel). (E,F) Immunoglobulin classes in (E) plasmablast and (F) non-plasmablast B cells in blood (red) vs. CSF (blue). (A-F) p values according to unpaired Student's t tests. (G-I) Single-cell BCR repertoire sequencing data, (G) clonality, percent of clonal sequences are shown in blood (red, larger numbers of sequences down-sampled to match CSF sequences) vs. CSF (blue), p values according to Mann-Whitney U test. (H) Overview of individual PB BCR repertoires, showing clonality, size of individual clonal expansions, and immunoglobulin classes in blood (upper panel) vs. CSF (lower panel), numbers indicate number of sequences, inner circle: colored wedges represent clonal expansions and grey area represents singleton antibody sequences, outer circle: immunoglobulin classes, red: IgG, blue: IgA, green: IgM, sequence locations in outer circle correspond to inner circle. (I) IGHV gene distribution in blood vs. CSF PB, p according to Student's T tests, Holm-Sidak adjusted p-values: *<0.05, **<0.01, ***<0.0001. (J,K) Mass spectrometry data of purified immunoglobulins from CSF samples in singleton BCR B cells (red) vs. clonally expanded B cells (blue), (J) percent of VDJ sequences that could be uniquely identified with mass spectrometry in the respective groups (PSM cutoff: 1), (K) percent of VDJ sequences that were highly abundant in CSF (≥10 PSM). (J,K) p values according to Mann-Whitney U test.

[0014] FIGS. 2A-L: CSF mAB reactivity to EBV proteins, EBNA1 epitope mapping, and structure of EBNA1-antibody complex. (A) Heatmap showing mAB reactivities (z-scores) to viral lysates and EBV proteins and (B) to EBNA1 peptides. Selected mABs are shown with highest reactivities to respective antigens. IE: immediate early, E: early, and L: late lytic stage. (C) Western blot of recombinant EBNA1 (full-length and truncated proteins), showing coomassie staining (top panel) and staining with MS39p2w174 (bottom panel). (D) MS39p2w174 tested on an ELISA-based alanine-scan of EBNA1 with 90 peptides (20mers, 13AA overlap). (E) EBNA1 AA386-405, logo representation showing the contribution of each residue to binding of MS39p2w174, as assessed by alanine-scan. (F-J) Crystal structure of MS39p2w174 in complex with EBNA1 AA386-405. (F) Cartoon and stick representation, showing EBNA1 AA393-401 in the binding groove. Additional peptide residues are truncated for better visualization. HC: red/brown colors, LC: blue/cyan, CDR loop colors correspond to annotations in G. (G) View of the binding groove from the top. Surface representation of the Fab with EBNA1 AA386-402 in stick representation. (H-J) Cartoon and stick representation outlining close interactions. Major H-bond forming residues are represented as sticks. H-bonds <3.1 Å are represented as black dashed lines. (I) Magnification of peptide in hydrophobic cage, (J) magnification of region around Arg396 to emphasize polar contacts of residues in the HC with Arg396 and Arg397. (K,L) (E) Bio-layer interferometry measurement of MS39p2w174 (blue) and germline (GL, red) affinity to EBNA1 full-length protein. (K) KD in nM, (L) association and dissociation curves. P according to unpaired Student's t test.

[0015] FIGS. 3A-P: Molecular Mimicry between EBNA1 and GlialCAM. (A) Heatmap showing top 16 results of Huprot array for MS39p2w174, compared to 3 control mABs, sorted from top to bottom by the ratio of MS39p2w174/average of controls (left column, min: 89, max: 911). Raw counts are shown in right four columns (min: 1, max: 36450). (B) ELISA measuring binding of MS39p2w174 and two control mABs to recombinant proteins EBNA1 AA328-641 as well as GlialCAM AA34-416 (full length) and A262-416 (intracellular domain, ICD). (C) Western blot GlialCAM full-length vs. ICD. Top panel: MS39p2w174, bottom panel: commercial anti-GlialCAM antibody (anti-extracellular domain). (D, E) Bio-layer interferometry measurement of MS39p2w174 affinity to GlialCAM ICD (AA262-416), (D) KD in nM, (E) association and dissociation curves, p according to unpaired Student's t test. (E) Logo plot, showing alignment of amino acid sequences of EBNA1 AA386-405 and GlialCAM AA370-389 with central epitope. (I) ELISA data showing binding of MS39p2w174 to EBNA1 AA386-405 and GlialCAM AA370-389 non-phosphorylated and phosphorylated at the indicated serine residues. (G,H) Prediction of disorder with PONDR for (G) EBNA1 and (H) GlialCAM. High scores indicate disorder, red bar: epitope region. (J,K) Bio-layer interferometry measurement of MS39p2w174 affinity to GlialCAM 20mer peptides. (J) KD in μM, (K) association and dissociation curves, pSer: phosphorylated Serine residues, p according to unpaired Student's t test. (L) Heatmap showing mAB reactivities (MFI) to GlialCAM proteins, peptides, and phosphorylated peptides as well as cross-reactivities to EBNA1 and other EBV proteins, ICD: intracellular domain, ECD: extracellular domain, pSer: phosphorylated serine residues. (M-O) ELISA data showing human plasma reactivities against (M) EBNA1 protein, (N) EBNA1 AA386-405, and (O) GlialCAM protein, p according to unpaired Student's t test. (P) Plasma reactivity to EBNA1 AA386-405, blocked with indicated proteins or peptides, p according to unpaired Student's t test.

[0016] FIGS. 4A-C: Relevance of EBNA1/GlialCAM cross-reactivity in a mouse model of MS. (A) Experimental autoimmune encephalomyelitis (EAE) scores of mice immunized with EBNA1 AA386-405 (red) and scrambled peptide control (blue), * p<0.05 (Mann-Whitney U test). (B) Mouse serum ELISA showing IgG reactivities against EBNA1 AA386-405 (top panel) and GlialCAM AA370-389 (bottom panel) in groups immunized with EBNA1 AA386-405 (red), scrambled peptide (blue), and PBS (black).

[0017] FIGS. 5A-F. Details of B cell phenotypes in blood and CSF. (A, B) Flow cytometry gating strategy for B cells, representative plots from (A) blood and (B) CSF (patient MS30). (C) B cell subsets as % of all B cells in blood (red) and CSF (blue). p according to unpaired Student's t test. (D) representative histogram showing integrin a4 expression in non-PB B cells (red) and PB (blue) in blood (top panel) and CSF (lower panel) (patient MS37). (E,F) HLA-DR expression on non-PB B cells (red) and PB (blue) in (E) blood and (F) CSF, in patients carrying HLA-DR15 vs. other HLA-genotypes (non-HLA-DR15), ns=non-significant, according to unpaired Student's t test.

[0018] FIGS. 6A-I. Extended BCR repertoire data. (A-F) Single-cell BCR repertoire sequencing data, (A) overview of individual BCR repertoires, comparison of CSF PB to non-PB B cells with respect to clonality, size of individual clonal expansions, and immunoglobulin classes in all CSF B cells (upper panel), CSF plasmablasts (middle panel), and CSF non-plasmablast B cells (lower panel), numbers indicate number of sequences, inner circle: colored wedges represent clonal expansions and grey area represents singleton antibody sequences, outer circle: immunoglobulin classes, red: IgG, blue: IgA, green: IgM, sequence locations in outer circle correspond to inner circle. <5 non-PB cells were sequenced from individual MS12 and only PB were sorted from MS39, therefore the respective samples were excluded from this figure. (B) IGHV and IGLV cumulated mutation count in PB in blood (red) vs. CSF (blue). (C) Mean HC CDR3 lengths (amino acid sequences) of PB in blood (red). vs. CSF (blue), (B,C) means±standard deviations across patients as well as means of individual patients are shown, p values according to unpaired Student's t test. (D-F) Immunoglobulin gene distributions in blood vs. CSF plasmablasts for (D) IGLV, (E) IGHJ, and (F) IGLJ, p according to Student's t tests, Holm-Sidak adjusted p-values: ***<0.0001. (G,H) Mass spectrometry data of purified immunoglobulins from CSF samples, comparing non-plasmablast B cells (red) with plasmablasts (blue), (G) percent of VDJ sequences that could be uniquely identified with mass spectrometry in the respective group (PSM cutoff: 1), (H) percent of VDJ sequences that were highly abundant in CSF (≥10 PSM). (G,H) p values according to Mann-Whitney U test. (I) Single-cell sequencing efficacy in non-plasmablast B cells (red) vs. PB (blue) in CSF. Fraction of sequences that passed filter thresholds are shown as percentages of the number of sorted cells in the respective group.

[0019] FIG. 7: Representative phylogenetic tree of patient MS37: CSF sequences (top half-circle) and blood sequences (bottom half-circle) are depicted. Each leaf represents the full-length HC and LC sequence of a B cell. Sequences are sorted from the interior to the exterior first by IGHV families, then by IGHV genes, and then concatenated HC/LC sequences are clustered. IGHV families, clonality, immunoglobulin class, plasmablast vs. non-plasmablast, mutation counts, and expressed sequences are indicated according to figure legend.

[0020] FIGS. 8A-B: CSF mAB reactivity to EBV peptides. (A) Heatmap showing mAB reactivities (z-scores) to EBV virus lysates and recombinant EBV proteins as well as other virus lysates. (B) Heatmap showing mAB reactivities (MFI) to GlialCAM proteins, peptides, and phosphorylated or citrullinated peptides. Results for all tested mABs and proteins/peptides are shown. IE: immediate early, E: early, and L: late lytic/activated stage, pSer: phosphorylated serine residue, Cit: citrulline residue, _B-_E: duplicate probes of same/similar lysates and proteins tested in different preparations or batches.

[0021] FIG. 9: CSF mAB reactivity to EBV peptides: Heatmap showing mAB reactivities (z-scores) to EBV peptides. Results for all tested mABs and peptides are shown. ICD: intracellular domain, ECD: extracellular domain, PM: peptide mix.

[0022] FIGS. 10A-G. mAB reactivity to EBV peptides and structural data for EBNA1 AA386-405/MS39p2w174 complex. (A) Heatmap showing mAB reactivities (z-scores) of selected mABs (as in FIG. 2A) against the selected reactive peptide antigens. ICD: intracellular domain, ECD: extracellular domain, PM: peptide mix. (B) ELISA-based alanine-scan on EBNA1 AA386-405, corresponding to FIG. 2E. Mean±standard deviation is shown from triplicate repeats of one representative out of 3 independent experiments. (C) 20× image of protein crystals in hanging drop. (D) Asymmetric unit containing two peptide-Fab complexes in a diagonal orientation, red/pink: HC, blue/cyan: LC, black/gray: peptide. (E) EBNA1 peptide and its 2mFo-DFc map (contoured at 10) are shown, depicted on HC (cyan) and LC (pink) in surface representation. (F,G) Amino acid sequences of variable regions of mAB MS39p2w174 (F) HC and (G) LC. Bold font: CDR, regular font: framework regions (FR), GL: germline with variable genes indicated, only germline residues that differ from MS39p2w174 sequence are shown, red: residues that closely interact with EBNA1 AA386-405, according to crystal structure, dots: gaps introduced during IMGT GapAlign for alignment and numbering purposes, numbers: residue numbers according to IMGT unique numbering.

[0023] FIGS. 11A-C. GlialCAM expression in human tissues: (A) Expression levels of GlialCAM in human organs (source: proteinatlas.org). (B) phosphorylation of single residues (source: phosphosite.org), (C) ELISA data: reactivities of MS39p2w174 to citrullinated versions of GlialCAM AA370-389.

[0024] FIGS. 12A-G. T cell activation and phenotype in response to immunization with EBNA1 AA389-405: (A) T cell proliferation and (B-G) ELISA measurement of indicated cytokines in response to indicated stimuli, in group immunized with scrambled peptide (blue) and EBNA1 AA386-405 (red), p according to unpaired Student's t test.

[0025] FIG. 13. MHC types of MS patients in which B cell repertoire sequencing was performed.

[0026] FIGS. 14-B. LMP-1. (A) Schematic depiction of LMP-1, showing 6 transmembrane domains and 3 extracellular domains. (B) Protein sequence, intracellular, transmembrane, and extracellular domains are annotated.

[0027] FIGS. 15A-B. LMP-2. (A) Schematic depiction of LMP-2, showing 12 transmembrane domains and 6 extracellular domains. (B) Protein sequence, intracellular, transmembrane, and extracellular domains are annotated.

[0028] FIG. 16A-B. BILF-1. (A) Schematic depiction of BILF-1, showing 7 transmembrane domains and 4 extracellular domains. (B) Protein sequence, intracellular, transmembrane, and extracellular domains are annotated.

[0029] FIG. 17. Overview of expression and function of LMP-1, LMP-2, and BILF-1. All three proteins are encoded by EBV genes and expressed as membrane proteins with accessible extracellular domains. LMP-1 and LMP-2 activate B cells by mimicking endogenous B cell activating signaling pathways. BILF-1 inhibits MHC class I expression and thereby inhibits anti-EBV T cell responses. Individual or combinations of monoclonal antibodies specific for LMP1; or LMP2; or BILF1; or LMP1+BILF1; or LMP2+BILF1; or LMP1+LMP2; or LMP1+LMP2+BILF1; can be used to deplete EBV-infected B cell to treat EBV infectious syndromes, EBV-mediated cancers, and/or EBV-driven autoimmune diseases.

### DETAILED DESCRIPTION OF THE EMBODIMENTS

[0030] The instant disclosure provides methods for the stratification of MS-patients for EBV-driven pathology. It is shown that hepacam/glialcam is cross-reactive with EBNA-1 epitopes and can drive such pathology. Tolerizing vaccines and methods of using such vaccines are provided for treating individuals having multiple sclerosis, systemic lupus erythematosus, Sjogren's Sydrome, type I diabetes, rheumatoid arthritis and other autoimmune diseases associated with EBV-infection. Aspects of the methods include administering to the individual, in need thereof, agents to deplete or inhibit pathogenic B cells. Aspects also include administration of an effective amount of an hepacam/glialcam tolerizing vaccine to reduce one or more symptoms of MS. Compositions and kits for practicing the methods of the disclosure are also provided.

[0031] Before the present methods are described, it is to be understood that this invention is not limited to particular methods described, as such may, of course, vary. It is also to be understood that the terminology used herein is for the purpose of describing particular embodiments only, and is not intended to be limiting, since the scope of the present invention will be limited only by the appended claims.

[0032] Where a range of values is provided, it is understood that each intervening value, to the tenth of the unit of the lower limit unless the context clearly dictates otherwise, between the upper and lower limit of that range and any other stated or intervening value in that stated range is encompassed within the invention. The upper and lower limits of these smaller ranges may independently be included in the smaller ranges, subject to any specifically excluded limit in the stated range. As used herein and in the appended claims, the singular forms “a”, “and”, and “the” include plural referents unless the context clearly dictates otherwise.

[0033] Unless defined otherwise, all technical and scientific terms used herein have the same meaning as commonly understood by one of ordinary skill in the art to which this invention belongs. Although any methods and materials similar or equivalent to those described herein can also be used in the practice or testing of the present invention, the preferred methods and materials are now described. All publications mentioned herein are incorporated herein by reference to disclose and describe the methods and/or materials in connection with which the publications are cited.

[0034] The publications discussed herein are provided solely for their disclosure prior to the filing date of the present application. Nothing herein is to be construed as an admission that the present invention is not entitled to antedate such publication by virtue of prior invention. Further, the dates of publication provided may be different from the actual publication dates, which may need to be independently confirmed.

[0035] General methods in molecular and cellular biochemistry can be found in such standard textbooks as Molecular Cloning: A Laboratory Manual, 3rd Ed. (Sambrook et al., Harbor Laboratory Press 2001); Short Protocols in Molecular Biology, 4th Ed. (Ausubel et al. eds., John Wiley & Sons 1999); Protein Methods (Bollag et al., John Wiley & Sons 1996); Nonviral Vectors for Gene Therapy (Wagner et al. eds., Academic Press 1999); Viral Vectors (Kaplift & Loewy eds., Academic Press 1995); Immunology Methods Manual (I. Lefkovits ed., Academic Press 1997); and Cell and Tissue Culture: Laboratory Procedures in Biotechnology (Doyle & Griffiths, John Wiley & Sons 1998). Reagents, cloning vectors, and kits for genetic manipulation referred to in this disclosure are available from commercial vendors such as BioRad, Stratagene, Invitrogen, Sigma-Aldrich, and ClonTech.

[0036] The present inventions have been described in terms of particular embodiments found or proposed by the present inventor to comprise preferred modes for the practice of the invention. It will be appreciated by those of skill in the art that, in light of the present disclosure, numerous modifications and changes can be made in the particular embodiments exemplified without departing from the intended scope of the invention. All such modifications are intended to be included within the scope of the appended claims.

[0037] Compositions and methods are provided that relate to the characterization, use, and manipulation of immunogenic peptides associated with autoimmune disease; and pathogenic B cells reactive with such immunogenic peptides.

[0038] The subject methods may be used for diagnostic, prophylactic or therapeutic purposes. As used herein, the term “treating” is used to refer to both prevention of relapses, and treatment of pre-existing conditions. For example, the prevention of autoimmune disease may be accomplished by administration of the agent prior to development of a relapse. “Treatment” as used herein covers any treatment of a disease in a mammal, particularly a human, and includes: (a) preventing the disease or symptom from occurring in a subject which may be predisposed to the disease or symptom but has not yet been diagnosed as having it; (b) inhibiting the disease symptom, i.e., arresting its development; or (c) reducing the symptoms of the disease, i.e., causing regression of the disease or symptom. The treatment of ongoing disease, where the treatment stabilizes or improves the clinical symptoms of the patient, is of particular interest.

[0039] “Inhibiting” the onset of a disorder shall mean either lessening the likelihood of the disorder's onset, or preventing the onset of the disorder entirely. Reducing the severity of a relapse shall mean that the clinical indicia associated with a relapse are less severe in the presence of the therapy than in an untreated disease. As used herein, onset may refer to a relapse in a patient that has ongoing relapsing remitting disease. The methods of the invention can be specifically applied to patients that have been diagnosed with autoimmune disease, including for example autoimmune disease. Treatment may be aimed at the treatment or reducing severity of relapses, which are an exacerbation of a pre-existing condition.

[0040] “Diagnosis” as used herein generally includes determination of a subject's susceptibility to a disease or disorder, determination as to whether a subject is presently affected by a disease or disorder, prognosis of a subject affected by a disease or disorder (e.g., identification of disease states, stages of disease, or responsiveness of disease to therapy), and use of therametrics (e.g., monitoring a subject's condition to provide information as to the effect or efficacy of therapy).

[0041] The term “biological sample” encompasses a variety of sample types obtained from an organism and can be used in a diagnostic or monitoring assay. The term encompasses blood, cerebral spinal fluid, and other liquid samples of biological origin, solid tissue samples, such as a biopsy specimen or tissue cultures or cells derived therefrom and the progeny thereof. The term encompasses samples that have been manipulated in any way after their procurement, such as by treatment with reagents, solubilization, or enrichment for certain components. The term encompasses a clinical sample, and also includes cells in cell culture, cell supernatants, cell lysates, serum, plasma, cerebrospinal fluid (CSF), biological fluids, and tissue samples.

[0042] The terms “individual,” “subject,” “host,” and “patient,” used interchangeably herein and refer to any mammalian subject for whom diagnosis, treatment, or therapy is desired, for example humans, non-human primate, mouse, rat, guinea pig, rabbit, etc. Mammals other than humans can be advantageously used as subjects that represent animal models of inflammation. A subject can be male or female.

[0043] The term “agent” as used herein includes any substance, molecule, element, compound, entity, or a combination thereof. It includes, but is not limited to, e.g., protein, oligopeptide, small organic molecule, polysaccharide, polynucleotide, and the like. It can be a natural product, a synthetic compound, or a chemical compound, or a combination of two or more substances. Unless otherwise specified, the terms “agent”, “substance”, and “compound” can be used interchangeably.

[0044] “Suitable conditions” shall have a meaning dependent on the context in which this term is used. That is, when used in connection with an antibody, the term shall mean conditions that permit an antibody to bind to its corresponding antigen. When used in connection with contacting an agent to a cell, this term shall mean conditions that permit an agent capable of doing so to enter a cell and perform its intended function. In one embodiment, the term “suitable conditions” as used herein means physiological conditions.

[0045] To “analyze” includes determining a set of values associated with a sample by measurement of a marker (such as, e.g., presence or absence of a marker or constituent expression levels) in the sample and comparing the measurement against measurement in a sample or set of samples from the same subject or other control subject(s). In particular the cell surface markers of the present teachings can be analyzed by any of various conventional methods known in the art. To “analyze” can include performing a statistical analysis to, e.g., determine whether a subject is a responder or a non-responder to a therapy (e.g., administration of a peptide or antibody treatment as described herein).

[0046] A “pharmaceutically acceptable excipient,” “pharmaceutically acceptable diluent,” “pharmaceutically acceptable carrier,” and “pharmaceutically acceptable adjuvant” means an excipient, diluent, carrier, and adjuvant that are useful in preparing a pharmaceutical composition that are generally safe, non-toxic and neither biologically nor otherwise undesirable, and include an excipient, diluent, carrier, and adjuvant that are acceptable for veterinary use as well as human pharmaceutical use. “A pharmaceutically acceptable excipient, diluent, carrier and adjuvant” as used in the specification and claims includes both one and more than one such excipient, diluent, carrier, and adjuvant.

[0047] As used herein, a “pharmaceutical composition” is meant to encompass a composition suitable for administration to a subject, such as a mammal, especially a human. In general a “pharmaceutical composition” is sterile, and preferably free of contaminants that are capable of eliciting an undesirable response within the subject (e.g., the compound(s) in the pharmaceutical composition is pharmaceutical grade). Pharmaceutical compositions can be designed for administration to subjects or patients in need thereof via a number of different routes of administration including oral, buccal, rectal, parenteral, intraperitoneal, intradermal, intratracheal, intramuscular, subcutaneous, and the like.

[0048] “Dosage unit” refers to physically discrete units suited as unitary dosages for the particular individual to be treated. Each unit can contain a predetermined quantity of active compound(s) calculated to produce the desired therapeutic effect(s) in association with the required pharmaceutical carrier. The specification for the dosage unit forms can be dictated by (a) the unique characteristics of the active compound(s) and the particular therapeutic effect(s) to be achieved, and (b) the limitations inherent in the art of compounding such active compound(s).

[0049] “Pharmaceutically acceptable excipient” means an excipient that is useful in preparing a pharmaceutical composition that is generally safe, non-toxic, and desirable, and includes excipients that are acceptable for veterinary use as well as for human pharmaceutical use. Such excipients can be solid, liquid, semisolid, or, in the case of an aerosol composition, gaseous.

[0050] “Pharmaceutically acceptable salts and esters” means salts and esters that are pharmaceutically acceptable and have the desired pharmacological properties. Such salts include salts that can be formed where acidic protons present in the compounds are capable of reacting with inorganic or organic bases. Suitable inorganic salts include those formed with the alkali metals, e.g. sodium and potassium, magnesium, calcium, and aluminum. Suitable organic salts include those formed with organic bases such as the amine bases, e.g., ethanolamine, diethanolamine, triethanolamine, tromethamine, N methylglucamine, and the like. Such salts also include acid addition salts formed with inorganic acids (e.g., hydrochloric and hydrobromic acids) and organic acids (e.g., acetic acid, citric acid, maleic acid, and the alkane- and arene-sulfonic acids such as methanesulfonic acid and benzenesulfonic acid). Pharmaceutically acceptable esters include esters formed from carboxy, sulfonyloxy, and phosphonoxy groups present in the compounds, e.g., C1-6 alkyl esters. When there are two acidic groups present, a pharmaceutically acceptable salt or ester can be a mono-acid-mono-salt or ester or a di-salt or ester; and similarly where there are more than two acidic groups present, some or all of such groups can be salified or esterified. Compounds named in this invention can be present in unsalified or unesterified form, or in salified and/or esterified form, and the naming of such compounds is intended to include both the original (unsalified and unesterified) compound and its pharmaceutically acceptable salts and esters. Also, certain compounds named in this invention may be present in more than one stereoisomeric form, and the naming of such compounds is intended to include all single stereoisomers and all mixtures (whether racemic or otherwise) of such stereoisomers.

[0051] The terms “pharmaceutically acceptable”, “physiologically tolerable” and grammatical variations thereof, as they refer to compositions, carriers, diluents and reagents, are used interchangeably and represent that the materials are capable of administration to or upon a human without the production of undesirable physiological effects to a degree that would prohibit administration of the composition.

[0052] A “therapeutically effective amount” means the amount that, when administered to a subject for treating a disease, is sufficient to effect treatment for that disease.

[0053] As used herein, the term “in combination” refers to the use of more than one prophylactic and/or therapeutic agents. The use of the term “in combination” does not restrict the order in which prophylactic and/or therapeutic agents are administered to a subject with a disorder. A first prophylactic or therapeutic agent can be administered prior to (e.g., 5 minutes, 15 minutes, 30 minutes, 45 minutes, 1 hour, 2 hours, 4 hours, 6 hours, 12 hours, 24 hours, 48 hours, 72 hours, 96 hours, 1 week, 2 weeks, 3 weeks, 4 weeks, 5 weeks 6 weeks, 8 weeks, or 12 weeks before), concomitantly with, or subsequent to (e.g., 5 minutes, 15 minutes, 30 minutes, 45 minutes, 1 hour, 2 hours, 4 hours, 6 hours, 12 hours, 24 hours, 48 hours, 72 hours, 96 hours, 1 week, 2 weeks, 3 weeks, 4 weeks, 5 weeks, 6 weeks, 8 weeks, or 12 weeks after) the administration of a second prophylactic or therapeutic agent to a subject with a disorder.

[0054] Immune tolerance, or immunological tolerance, or immunotolerance, is a state of unresponsiveness of the immune system to substances or tissue that have the capacity to elicit an immune response in a given organism. A tolerogenic regimen or formulation is a regimen or formulation that induces tolerance to an antigen of interest, e.g. tolerance to autoantigens such as myelin basic protein. A tolerogenic dose is the dose of an agent, e.g. peptide, altered peptide ligand, DNA vector, etc. that is sufficient to decrease undesirable immune responsiveness to a target antigen. A tolerogenic DNA construct is a DNA construct that encodes a tolerogenic peptide(s) that decreases undesirable immune responsiveness to a target antigen. A tolerogenic peptide is a peptide that acts to decrease undesirable immune responsiveness to a target antigen.

[0055] Tolerance can be induced through an immunization protocol developed to activate suppressive immune responses against an antigen. Tolerance is classified into central tolerance or peripheral tolerance depending on where the state is originally induced—in the thymus and bone marrow (central) or in other tissues and lymph nodes (peripheral).

[0056] Immune tolerance encompasses the range of physiological mechanisms by which the body reduces or eliminates an immune response to particular agents. It is used to describe the phenomenon underlying discrimination of self from non-self, suppressing allergic responses, allowing chronic infection instead of rejection and elimination, and preventing attack of fetuses by the maternal immune system.

[0057] Peripheral tolerance develops after T and B cells mature and enter the peripheral tissues and lymph nodes. It is established by a number of partly overlapping mechanisms that mostly involve control at the level of T cells, especially CD4+ helper T cells, which orchestrate immune responses Reactivity toward certain antigens may be reduced by induction of tolerance after repeated exposure, or exposure in a certain context. In these cases, there can be a differentiation of naïve CD4+ helper T cells into induced Treg cells (iTreg cells) in the peripheral tissue or nearby lymphoid tissue (lymph nodes, mucosal-associated lymphoid tissue, etc.).

### EBV

[0058] The Epstein-Barr virus (EBV), formally called Human gammaherpesvirus 4, is one of the nine known human herpesvirus types in the herpes family, and is one of the most common viruses in humans. It is best known as the cause of infectious mononucleosis (“mono” or “glandular fever”).

[0059] Infection with EBV occurs by the oral transfer of saliva and genital secretions. Most people become infected with EBV and gain adaptive immunity. In the United States, about half of all five-year-old children and about 90% of adults have evidence of previous infection. Infants become susceptible to EBV as soon as maternal antibody protection disappears. Many children become infected with EBV, and these infections usually cause no symptoms or are indistinguishable from the other mild, brief illnesses of childhood. In the United States and other developed countries, many people are not infected with EBV in their childhood years. When infection with EBV occurs during adolescence, it causes infectious mononucleosis in approximately 35 to 50% of infected individuals.

[0060] EBV infects B cells of the immune system and epithelial cells. Once EBV's initial lytic infection is brought under control, EBV latency persists in the individual's B cells for the rest of their life. When EBV infects B cells in vitro, lymphoblastoid cell lines eventually emerge that are capable of indefinite growth. The growth transformation of these cell lines is the consequence of viral protein expression. EBNA-2, EBNA-3C, and LMP-1 are essential for transformation, whereas EBNA-LP and the EBERs are not. Following natural infection with EBV, the virus is thought to execute some or all of its repertoire of gene expression programs to establish a persistent infection. Given the initial absence of host immunity, the lytic cycle produces large numbers of virions to infect other (presumably) B-lymphocytes within the host.

[0061] The latent programs reprogram and subvert infected B-lymphocytes to proliferate and bring infected cells to the sites at which the virus presumably persists. Eventually, when host immunity develops, the virus persists by turning off most (or possibly all) of its genes, only occasionally reactivating to produce fresh virions. A balance is eventually struck between occasional viral reactivation and host immune surveillance removing cells that activate viral gene expression.

### Disease Conditions

[0062] This invention relates to autoimmune diseases, cancers, and infectious conditions associated with EBV infection, and in which EBV drives pathogenic B cell responses.

### Autoimmune Diseases

[0063] Autoimmune diseases associated with EBV infection include multiple sclerosis (MS), systemic lupus erythematosus (SLE), type I diabetes (T1D), Sjogren's Syndrome, rheumatoid arthritis (RA), dermatomyositis (DM), and other autoimmune diseases.

[0064] Multiple sclerosis (MS) is characterized by various symptoms and signs of CNS dysfunction, with remissions and recurring exacerbations. Classifications of interest for analysis by the methods of the invention include relapsing remitting MS (RRMS), primary progressive MS (PPMS) and secondary progressive MS (SPMS). The most common presenting symptoms are paresthesias in one or more extremities, in the trunk, or on one side of the face; weakness or clumsiness of a leg or hand; or visual disturbances, e.g. partial blindness and pain in one eye (retrobulbar optic neuritis), dimness of vision, or scotomas. Other common early symptoms are ocular palsy resulting in double vision (diplopia), transient weakness of one or more extremities, slight stiffness or unusual fatigability of a limb, minor gait disturbances, difficulty with bladder control, vertigo, and mild emotional disturbances; all indicate scattered CNS involvement and often occur months or years before the disease is recognized. Excess heat can accentuate symptoms and signs.

[0065] Systemic lupus erythematosus (SLE). Lupus, technically known as systemic lupus erythematosus (SLE), is an autoimmune disease in which the body's immune system mistakenly attacks healthy tissue in many parts of the body. Symptoms vary between people and may be mild to severe. Common symptoms include painful and swollen joints, fever, chest pain, hair loss, mouth ulcers, swollen lymph nodes, feeling tired, and a red rash which is most commonly on the face. Often there are periods of illness, called flares, and periods of remission during which there are few symptoms.

[0066] The cause of SLE is not clear. It is thought to involve genetics together with environmental factors. Among identical twins, if one is affected there is a 24% chance the other one will be as well. Female sex hormones, sunlight, smoking, vitamin D deficiency, and certain infections are also believed to increase the risk. The mechanism involves an immune response by autoantibodies against a person's own tissues. These are most commonly anti-nuclear antibodies and they result in inflammation. Diagnosis can be difficult and is based on a combination of symptoms and laboratory tests. There are a number of other kinds of lupus erythematosus including discoid lupus erythematosus, neonatal lupus, and subacute cutaneous lupus erythematosus.

[0067] Sjogren's Syndrome (SjS, SS). Sjögren's syndrome is a long-term autoimmune disease that affects the body's moisture-producing (lacrimal and salivary) glands, and often seriously affects other organs systems, such as the lungs, kidneys, and nervous system. Primary symptoms are dryness (dry mouth and dry eyes), pain and fatigue Other symptoms can include dry skin, vaginal dryness, a chronic cough, numbness in the arms and legs, feeling tired, muscle and joint pains, and thyroid problems. Those affected are also at an increased risk (5%) of lymphoma.

[0068] Type I diabetes (T1D). Type 1 diabetes, previously known as juvenile diabetes, is a form of diabetes in which very little or no insulin is produced by the islets of Langerhans in the pancreas. Insulin is a hormone required for the body to use blood sugar. Before treatment this results in high blood sugar levels in the body. The classic symptoms are frequent urination, increased thirst, increased hunger, and weight loss. Additional symptoms may include blurry vision, tiredness, and poor wound healing. Symptoms typically develop over a short period of time, often a matter of weeks.

[0069] The cause of type 1 diabetes is unknown, but it is believed to involve a combination of genetic and environmental factors. Risk factors include having a family member with the condition. The underlying mechanism involves an autoimmune destruction of the insulin producing beta cells in the pancreas. Diabetes is diagnosed by testing the level of sugar or glycated hemoglobin (HbA1C) in the blood. Type 1 diabetes can be distinguished from type 2 by testing for the presence of autoantibodies.

[0070] There is no known way to prevent type 1 diabetes. Treatment with insulin is required for survival. Insulin therapy is usually given by injection just under the skin but can also be delivered by an insulin pump. A diabetic diet and exercise are important parts of management. If left untreated, diabetes can cause many complications. Complications of relatively rapid onset include diabetic ketoacidosis and nonketotic hyperosmolar coma. Long-term complications include heart disease, stroke, kidney failure, foot ulcers and damage to the eyes. Furthermore, complications may arise from low blood sugar caused by excessive dosing of insulin.

[0071] Rheumatoid arthritis (RA). Rheumatoid arthritis is a long-term autoimmune disorder that primarily affects joints. It typically results in warm, swollen, and painful joints. Pain and stiffness often worsen following rest. Most commonly, the wrist and hands are involved, with the same joints typically involved on both sides of the body. The disease may also affect other parts of the body. This may result in a low red blood cell count, inflammation around the lungs, and inflammation around the heart. Fever and low energy may also be present. Often, symptoms come on gradually over weeks to months.

[0072] While the cause of rheumatoid arthritis is not clear, it is believed to involve a combination of genetic and environmental factors. The underlying mechanism involves the body's immune system attacking the joints. This results in inflammation and thickening of the joint capsule. It also affects the underlying bone and cartilage. The diagnosis is made mostly on the basis of a person's signs and symptoms. X-rays and laboratory testing may support a diagnosis or exclude other diseases with similar symptoms. Other diseases that may present similarly include systemic lupus erythematosus, psoriatic arthritis, and fibromyalgia among others.

[0073] The goals of treatment are to reduce pain, decrease inflammation, and improve a person's overall functioning. This may be helped by balancing rest and exercise, the use of splints and braces, or the use of assistive devices. Pain medications, steroids, and NSAIDs are frequently used to help with symptoms. Disease-modifying antirheumatic drugs (DMARDs), such as hydroxychloroquine and methotrexate, may be used to try to slow the progression of disease. Biological DMARDs may be used when disease does not respond to other treatments. However, they may have a greater rate of adverse effects. Surgery to repair, replace, or fuse joints may help in certain situations.

[0074] Dermatomyositis (DM). Dermatomyositis is a long-term inflammatory disorder which affects skin and the muscles. Its symptoms are generally a skin rash and worsening muscle weakness over time. These may occur suddenly or develop over months. Other symptoms may include weight loss, fever, lung inflammation, or light sensitivity. Complications may include calcium deposits in muscles or skin.

[0075] The cause is unknown. Theories include that it is an autoimmune disease or a result of a viral infection. It is a type of inflammatory myopathy. Diagnosis is typically based on some combination of symptoms, blood tests, electromyography, and muscle biopsies.

[0076] While no cure for the condition is known, treatments generally improve symptoms. Treatments may include medication, physical therapy, exercise, heat therapy, orthotics and assistive devices, and rest. Medications in the corticosteroids family are typically used with other agents such as methotrexate or azathioprine recommended if steroids are not working well. Intravenous immunoglobulin may also improve outcomes. Most people improve with treatment and in some the condition resolves completely.

### At-Risk Individuals for Autoimmune Disease

[0077] In some embodiments the methods of the invention comprise treating, isolating cell populations from, or diagnosing individuals “at-risk” for development of, or in the “early-stages” of, an autoimmune disease. “At risk” for development of an autoimmune disease includes: (1) individuals whom are at increased risk for development of an autoimmune disease, and (2) individuals exhibiting a “pre-clinical” disease state, but do not meet the diagnostic criteria for the autoimmune disease (and thus are not formally considered to have the autoimmune disease).

[0078] Individuals “at increased risk” for development (also termed “at-risk” for development) of an autoimmune disease are individuals with a higher likelihood of developing an autoimmune disease or disease associated with inflammation compared to the general population. Such individuals can be identified based on their exhibiting or possessing one or more of the following: a family history of autoimmune disease; the presence of certain genetic variants (genes) or combinations of genetic variants which predispose the individual to such an autoimmune disease; the presence of physical findings, laboratory test results, imaging findings, marker test results (also termed “biomarker” test results) associated with development of the autoimmune disease, or marker test results associated with development of a metabolic disease; the presence of clinical signs related to the autoimmune disease; the presence of certain symptoms related to the autoimmune disease (although the individual is frequently asymptomatic); the presence of markers (also termed “biomarkers”) of inflammation; and other findings that indicate an individual has an increased likelihood over the course of their lifetime to develop an autoimmune disease or disease associated with inflammation. Most individuals at increased risk for development of an autoimmune disease or disease associated with inflammation are asymptomatic, and are not experiencing any symptoms related to the disease that they are at an increased risk for developing.

[0079] Included, without limitation, in the group of individuals at increased risk of developing an autoimmune disease, are individuals exhibiting “a pre-clinical disease state”. The pre-disease state may be diagnosed based on developing symptoms, physical findings, laboratory test results, imaging results, and other findings that result in the individual meeting the diagnostic criteria for the autoimmune disease, and thus being formally diagnosed. Individuals with “pre-clinical disease” exhibit findings that suggest that the individual is in the process of developing the autoimmune disease, but do not exhibit findings, including the symptoms, clinical findings, laboratory findings, and/or imaging findings, etc. that are necessary to meet the diagnostic criteria for a formal diagnosis of the autoimmune disease. In some embodiments, individuals exhibiting a pre-clinical disease state possess a genetic variant or a combination of genetic variants that place them at increased risk for development of disease as compared to individuals who do not possess that genetic variant or that combination of genetic variants. In some embodiments, these individuals have laboratory results, or physical findings, or symptoms, or imaging findings that place them at increased risk for development of an autoimmune disease. In some embodiments, individuals with preclinical disease states are asymptomatic. In some embodiments, individuals with pre-clinical disease states exhibit increased or decreased levels of the expression of certain genes, certain proteins, autoimmune markers, metabolic markers, and other markers.

[0080] In certain embodiments, this invention is directed to the treatment of individuals with established autoimmune disease or disease associated with inflammation. The autoimmune disease can be diagnosed based on an individual that exhibits symptoms, signs, clinical features, laboratory test results, imaging test results, biomarker results, and other findings that enable a physician to formally diagnose that individual with the autoimmune disease, which findings can include the detection of pathogenic B cells activated by a cross-reactive antigenic peptide as disclosed herein.

[0081] In some embodiments, established autoimmune disease is an autoimmune disease for which an individual has had a formal diagnosis of the disease made by a physician for longer than 6 months. In established autoimmune disease, the signs or symptoms of disease may be more severe as compared to, for example, the symptoms for an individual diagnosed with early-stage autoimmune disease. In established autoimmune disease, the disease process may cause tissue or organ damage. As described herein, in certain embodiments, determination of inflammation in an individual with established disease can comprise analyzing the individual for the presence of at least one marker indicative of the presence of inflammation.

[0082] An autoimmune disease is considered a disease which exhibits clinical manifestations (abnormal clinical markers) such as visible inflammation including pain, swelling, warmth, and redness, and with respect to the present invention, will involve as a causative agent antigen-specific pathologic CD4+ T cells. Autoimmune diseases include without limitation autoimmune diseases, and may further include diseases with a specific T cell mediated component.

### EBV-Mediated Cancers

[0083] EBV is also associated with various non-malignant, premalignant, and malignant lymphoproliferative diseases such as Burkitt lymphoma, hemophagocytic lymphohistiocytosis, and Hodgkin's lymphoma; non-lymphoid malignancies such as gastric cancer and nasopharyngeal carcinoma; and conditions associated with human immunodeficiency virus such as hairy leukoplakia and central nervous system lymphomas. About 200,000 cancer cases per year are thought to be attributable to EBV.

### EBV-Mediated Infections

[0084] Infectious diseases associated with EBV infection include infectious mononucleosis and chronic active EBV infection. Most people are infected by EBV as children, when the disease produces few or no symptoms. In young adults, the disease often results in fever, sore throat, enlarged lymph nodes in the neck, and tiredness. Most people recover in two to four weeks; however, feeling tired may last for months. The liver or spleen may also become swollen, and in less than one percent of cases splenic rupture may occur. Chronic active EBV infection is actually classified as lymphoproliferative disorder. It is a rare and often fatal complication of EBV infection that most often occurs in children or adolescents of Asian or South American lineage, although cases in Hispanics, Europeans and Africans have been reported. Symptoms are fever, hepatitis, splenomegaly, and pancytopenia.

### Identification of a Cross-Reactive Antigenic Peptide

[0085] GlialCAM, also known in the art as hepaCAM is a glycoprotein containing an extracellular domain with 2 Ig-like loops, a transmembrane region and a cytoplasmic domain. GlialCAM is expressed at particularly high levels in the central nervous system (CNS). Functionally, glialCAM is involved in cell-extracellular matrix interactions and growth control of cancer cells, and is able to induce differentiation of glioblastoma cells. In cell signaling, GlialCAM directly interacts with F-actin and calveolin 1, and is capable of inducing senescence-like growth arrest via a p53/p21-dependent pathway. It acts as a chaperone for Aquaporin-4, which is the main autoantigen in the MS-related neuroinflammatory disorder neuromyelitis optica (NMO). GlialCAM can be proteolytically cleaved near the transmembrane region. The reference protein sequence may be found at Genbank, locus NP_689935. The mature protein is residues 34-416.

MKRERGALSR ASRALRLAPF VYLLLIQTDP LEGVNITSPV
RLIHGTVGKS ALLSVQYSST SSDRPVVKWQ LKRDKPVTVV
QSIGTEVIGT LRPDYRDRIR LFENGSLLLS DLQLADEGTY
EVEISITDDT FTGEKTINLT VDVPISRPQV LVASTTVLEL
SEAFTLNCSH ENGTKPSYTW LKDGKPLLND SRMLLSPDQK
VLTITRVLME DDDLYSCMVE NPISQGRSLP VKITVYRRSS
LYIILSTGGI FLLVTLVTVC ACWKPSKRKQ KKLEKQNSLE
YMDQNDDRLK PEADTLPRSG EQERKNPMAL YILKDKDSPE
TEENPAPEPR SATEPGPPGY SVSPAVPGRS PGLPIRSARR
YPRSPARSPA TGRTHSSPPR APSSPGRSRS ASRTLRTAGV
HIIREQDEAG PVEISA

[0086] EBNA1 is a major transcription factor of the Epstein-Barr virus. It plays an essential role in replication and partitioning of viral genomic DNA during latent viral infection. The sequence of EBNA1 may be accessed at public databases, for example at UniParc P03211-1.

MSDEGPGTGP GNGLGEKGDT SGPEGSGGSG PQRRGGDNHG
RGRGRGRGRG GGRPGAPGGS GSGPRHRDGV RRPQKRPSCI
GCKGTHGGTG AGAGAGGAGA GGAGAGGGAG AGGGAGGAGG
AGGAGAGGGA GAGGGAGGAG GAGAGGGAGA GGGAGGAGAG
GGAGGAGGAG AGGGAGAGGG AGGAGAGGGA GGAGGAGAGG
GAGAGGAGGA GGAGAGGAGA GGGAGGAGGA GAGGAGAGGA
GAGGAGAGGA GGAGAGGAGG AGAGGAGGAG AGGGAGGAGA
GGGAGGAGAG GAGGAGAGGA GGAGAGGAGG AGAGGGAGAG
GAGAGGGGRG RGGSGGRGRG GSGGRGRGGS GGRRGRGRER
ARGGSRERAR GRGRGRGEKR PRSPSSQSSS SGSPPRRPPP
GRRPFFHPVG EADYFEYHQE GGPDGEPDVP PGAIEQGPAD
DPGEGPSTGP RGQGDGGRRK KGGWFGKHRG QGGSNPKFEN
IAEGLRALLA RSHVERTTDE GTWVAGVFVY GGSKTSLYNL
RRGTALAIPQ CRLTPLSRLP FGMAPGPGPQ PGPLRESIVC
YFMVFLQTHI FAEVLKDAIK DLVMTKPAPT CNIRVTVCSF
DDGVDLPPWF PPMVEGAAAE GDDGDDGDEG GDGDEGEEGQ
E

[0087] As shown in the Examples, the peptide antigen thus identified may be a native peptide of the individual, or may be cross-reactive EBNA-1 peptide that activates B cells. The peptide is useful as a screening tool, and also finds use as a therapeutic agent to activate tolerance.

[0088] Peptides, including the cross-reactive peptides disclosed herein, usually comprise at least about 8 amino acids, at least about 9 amino acids, at least about 10 amino acids, at least about 11 amino acids, at least about 12 amino acids, at least about 13 amino acids, at least about 15 amino acids, or more, and may be from about 8 amino acids in length to about 40 amino acids in length, from about 8 to about 30 amino acids in length, from about 8 to about 25, from about 8 to about 20 amino acids in length, from about 8 to about 18 amino acids in length. A peptide may, for example, comprise the provided amino acid sequence of glialcam, including the epitope cross-reactive with EBNA-1, and may further include fusion polypeptides as known in the art in addition to the provided sequences, where the fusion partner is other than a native protein sequence. Peptides useful in this invention also include derivatives, variants, and biologically active fragments of naturally occurring peptides, and the like. The peptide may, for example, comprise 1 amino acid substitution, 2 amino acid substitutions, 3 amino acid substitutions. The peptide sequence may be a designed sequenced derived from mutagenesis in the diverse peptide library.

[0089] Peptides can be modified, e.g., joined to a wide variety of other oligopeptides or proteins for a variety of purposes. For example, post-translationally modified, for example by prenylation, acetylation, amidation, carboxylation, glycosylation, pegylation, etc. Such modifications can also include modifications of glycosylation, e.g. those made by modifying the glycosylation patterns of a polypeptide during its synthesis and processing or in further processing steps; e.g. by exposing the polypeptide to enzymes which affect glycosylation, such as mammalian glycosylating or deglycosylating enzymes. In some embodiments, variants of the present invention include variants having phosphorylated amino acid residues, e.g. phosphotyrosine, phosphoserine, or phosphothreonine.

[0090] The ability of a peptide to modulate lymphocyte activity can be determined, for example, by the ability of the peptide to bind to pathogenic B cells or antibodies present in the peripheral blood, or CSF.

[0091] In some embodiments, a peptide is provided as a fusion protein, e.g., fused in frame with a second polypeptide. In some embodiments, the second polypeptide is capable of increasing the size of the fusion protein, e.g., so that the fusion protein will not be cleared from the circulation rapidly. In some other embodiments, the second polypeptide is part or whole of Fc region. In some other embodiments, the second polypeptide is any suitable polypeptide that is substantially similar to Fc, e.g., providing increased size and/or additional binding or interaction with Ig molecules. These fusion proteins can facilitate purification and show an increased half-life in vivo. Fusion proteins having disulfide-linked dimeric structures (due to the IgG) can also be more efficient in binding and neutralizing other molecules than the monomeric secreted protein or protein fragment alone.

[0092] In some other embodiments, peptide variants of the present invention include variants further modified to improve their resistance to proteolytic degradation or to optimize solubility properties or to render them more suitable as a therapeutic agent. For example, variants of the present invention further include analogs containing residues other than naturally occurring L-amino acids, e.g. D-amino acids or non-naturally occurring synthetic amino acids. D-amino acids may be substituted for some or all of the amino acid residues.

[0093] The polypeptides may be prepared by cell-free translation systems, or synthetic in vitro synthesis, using conventional methods as known in the art. Various commercial synthetic apparatuses are available, for example, automated synthesizers by Applied Biosystems, Inc., Foster City, Calif., Beckman, etc. By using synthesizers, naturally occurring amino acids may be substituted with unnatural amino acids. The particular sequence and the manner of preparation will be determined by convenience, economics, purity required, and the like.

[0094] The polypeptides may also be isolated and purified in accordance with conventional methods of recombinant synthesis. A lysate may be prepared of the expression host and the lysate purified using HPLC, exclusion chromatography, gel electrophoresis, affinity chromatography, or other purification technique. For the most part, the compositions which are used will comprise at least 20% by weight of the desired product, more usually at least about 75% by weight, preferably at least about 95% by weight, and for therapeutic purposes, usually at least about 99.5% by weight, in relation to contaminants related to the method of preparation of the product and its purification. Usually, the percentages will be based upon total protein.

### Antibodies Specific for Cross-Reactive Peptides

[0095] Antibodies may be raised to the cross-reactive peptide(s), or may comprise a set of CDR sequences from the sequences provided in Table 3. As used in this invention, the term “epitope” means any antigenic determinant on an antigen to which the paratope of an antibody binds. Epitopic determinants usually consist of chemically active surface groupings of molecules such as amino acids or sugar side chains and usually have specific three dimensional structural characteristics, as well as specific charge characteristics.

[0096] The term “antibody” is used in the broadest sense and specifically covers monoclonal antibodies (including full length monoclonal antibodies), polyclonal antibodies, multispecific antibodies (e.g., bispecific antibodies), and antibody fragments so long as they exhibit the desired biological activity. “Antibodies” (Abs) and “immunoglobulins” (lgs) are glycoproteins having the same structural characteristics. While antibodies exhibit binding specificity to a specific antigen, immunoglobulins include both antibodies and other antibody-like molecules which lack antigen specificity. Polypeptides of the latter kind are, for example, produced at low levels by the lymph system and at increased levels by myelomas.

[0097] As used herein, the term “antibody” refers to a polypeptide that includes canonical immunoglobulin sequence elements sufficient to confer specific binding to a particular target antigen. As is known in the art, intact antibodies as produced in nature are approximately 150 kD tetrameric agents comprised of two identical heavy chain polypeptides (about 50 kD each) and two identical light chain polypeptides (about 25 kD each) that associate with each other into what is commonly referred to as a “Y-shaped” structure. Each heavy chain is comprised of at least four domains (each about 110 amino acids long)—an amino-terminal variable (VH) domain (located at the tips of the Y structure), followed by three constant domains: CH1, CH2, and the carboxy-terminal CH3 (located at the base of the Y's stem). A short region, known as the “switch”, connects the heavy chain variable and constant regions. The “hinge” connects CH2 and CH3 domains to the rest of the antibody. Two disulfide bonds in this hinge region connect the two heavy chain polypeptides to one another in an intact antibody. Each light chain is comprised of two domains—an amino-terminal variable (VL) domain, followed by a carboxy-terminal constant (CL) domain, separated from one another by another “switch”. Intact antibody tetramers are comprised of two heavy chain-light chain dimers in which the heavy and light chains are linked to one another by a single disulfide bond; two other disulfide bonds connect the heavy chain hinge regions to one another, so that the dimers are connected to one another and the tetramer is formed. Naturally-produced antibodies are also glycosylated, typically on the CH2 domain. Each domain in a natural antibody has a structure characterized by an “immunoglobulin fold” formed from two beta sheets (e.g., 3-, 4-, or 5-stranded sheets) packed against each other in a compressed antiparallel beta barrel. Each variable domain contains three hypervariable loops known as “complement determining regions” (CDR1, CDR2, and CDR3) and four somewhat invariant “framework” regions (FR1, FR2, FR3, and FR4). When natural antibodies fold, the FR regions form the beta sheets that provide the structural framework for the domains, and the CDR loop regions from both the heavy and light chains are brought together in three-dimensional space so that they create a single hypervariable antigen binding site located at the tip of the Y structure.

[0098] The Fc region of naturally-occurring antibodies binds to elements of the complement system, and also to receptors on effector cells, including for example effector cells that mediate cytotoxicity, including specifically ADCP. As is known in the art, affinity and/or other binding attributes of Fc regions for Fc receptors can be modulated through glycosylation or other modification. In some embodiments, antibodies produced and/or utilized in accordance with the present invention include glycosylated Fc domains, including Fc domains with modified or engineered such glycosylation. For purposes of the present invention, in certain embodiments, any polypeptide or complex of polypeptides that includes sufficient immunoglobulin domain sequences as found in natural antibodies can be referred to and/or used as an “antibody”, whether such polypeptide is naturally produced (e.g., generated by an organism reacting to an antigen), or produced by recombinant engineering, chemical synthesis, or other artificial system or methodology. In some embodiments, an antibody is polyclonal; in some embodiments, an antibody is monoclonal.

[0099] In some embodiments, an antibody has constant region sequences that are characteristic of mouse, rabbit, primate, or human antibodies. In some embodiments, antibody sequence elements are humanized, primatized, chimeric, etc., as is known in the art.

[0100] Moreover, the term “antibody” as used herein, can refer in appropriate embodiments (unless otherwise stated or clear from context) to any of the art-known or developed constructs or formats for utilizing antibody structural and functional features in alternative presentation. For example, embodiments, an antibody utilized in accordance with the present invention is in a format selected from, but not limited to, intact IgG, IgE and IgM, bi- or multi-specific antibodies (e.g., Zybodies®, etc.), single chain Fvs, polypeptide-Fc fusions, Fabs, cameloid antibodies, masked antibodies (e.g., Probodies®), Small Modular ImmunoPharmaceuticals (“SMIPs™”), single chain or Tandem diabodies (TandAb®), VHHs, Anticalins®, Nanobodies®, minibodies, BiTE® s, ankyrin repeat proteins or DARPINs®, Avimers®, a DART, a TCR-like antibody, Adnectins®, Affilins®, Trans-bodies®, Affibodies®, a TrimerX®, MicroProteins, Fynomers®, Centyrins®, and a KALBITOR®. In some embodiments, an antibody may lack a covalent modification (e.g., attachment of a glycan) that it would have if produced naturally. In some embodiments, an antibody may contain a covalent modification (e.g., attachment of a glycan, a payload, e.g., a detectable moiety, a therapeutic moiety, a catalytic moiety, etc., or other pendant group [e.g., poly-ethylene glycol, etc.

[0101] Exemplary antibody agents include, but are not limited to, human antibodies, primatized antibodies, chimeric antibodies, bi-specific antibodies, humanized antibodies, conjugated antibodies (i.e., antibodies conjugated or fused to other proteins, radiolabels, cytotoxins), Small Modular ImmunoPharmaceuticals (“SMIPs™”), single chain antibodies, cameloid antibodies, and antibody fragments. As used herein, the term “antibody agent” also includes intact monoclonal antibodies, polyclonal antibodies, single domain antibodies (e.g., shark single domain antibodies (e.g., IgNAR or fragments thereof)), multispecific antibodies (e.g. bi-specific antibodies) formed from at least two intact antibodies, and antibody fragments so long as they exhibit the desired biological activity. In some embodiments, the term encompasses stapled peptides. In some embodiments, the term encompasses one or more antibody-like binding peptidomimetics. In some embodiments, the term encompasses one or more antibody-like binding scaffold proteins. In come embodiments, the term encompasses monobodies or adnectins.

[0102] In many embodiments, an antibody agent is or comprises a polypeptide whose amino acid sequence includes one or more structural elements recognized by those skilled in the art as a complementarity determining region (CDR); in some embodiments an antibody agent is or comprises a polypeptide whose amino acid sequence includes at least one CDR (e.g., at least one heavy chain CDR and/or at least one light chain CDR) that is substantially identical to one found in a reference antibody. In some embodiments an included CDR is substantially identical to a reference CDR in that it is either identical in sequence or contains between 1-5 amino acid substitutions as compared with the reference CDR. In some embodiments an included CDR is substantially identical to a reference CDR in that it shows at least 85%, 86%, 87%, 88%, 89%, 90%, 91%, 92%, 93%, 94%, 95%, 96%, 97%, 98%, 99%, or 100% sequence identity with the reference CDR. In some embodiments an included CDR is substantially identical to a reference CDR in that it shows at least 96%, 96%, 97%, 98%, 99%, or 100% sequence identity with the reference CDR. In some embodiments an included CDR is substantially identical to a reference CDR in that at least one amino acid within the included CDR is deleted, added, or substituted as compared with the reference CDR but the included CDR has an amino acid sequence that is otherwise identical with that of the reference CDR. In some embodiments an included CDR is substantially identical to a reference CDR in that 1-5 amino acids within the included CDR are deleted, added, or substituted as compared with the reference CDR but the included CDR has an amino acid sequence that is otherwise identical to the reference CDR. In some embodiments an included CDR is substantially identical to a reference CDR in that at least one amino acid within the included CDR is substituted as compared with the reference CDR but the included CDR has an amino acid sequence that is otherwise identical with that of the reference CDR. In some embodiments an included CDR is substantially identical to a reference CDR in that 1-5 amino acids within the included CDR are deleted, added, or substituted as compared with the reference CDR but the included CDR has an amino acid sequence that is otherwise identical to the reference CDR. In some embodiments, an antibody agent is or comprises a polypeptide whose amino acid sequence includes structural elements recognized by those skilled in the art as an immunoglobulin variable domain. In some embodiments, an antibody agent is a polypeptide protein having a binding domain which is homologous or largely homologous to an immunoglobulin-binding domain.

[0103] “Native antibodies and immunoglobulins” are usually heterotetrameric glycoproteins of about 150,000 daltons, composed of two identical light (L) chains and two identical heavy (H) chains. Each light chain is linked to a heavy chain by one covalent disulfide bond, while the number of disulfide linkages varies between the heavy chains of different immunoglobulin isotypes. Each heavy and light chain also has regularly spaced intrachain disulfide bridges. Each heavy chain has at one end a variable domain (VH) followed by a number of constant domains. Each light chain has a variable domain at one end (VL) and a constant domain at its other end; the constant domain of the light chain is aligned with the first constant domain of the heavy chain, and the light chain variable domain is aligned with the variable domain of the heavy chain. Particular amino acid residues are believed to form an interface between the light- and heavy-chain variable domains (Clothia et al., J. Mol. Biol. 186:651 (1985); Novotny and Haber, Proc. Natl. Acad. Sci. U.S.A. 82:4592 (1985)).

[0104] The term “variable” refers to the fact that certain portions of the variable domains differ extensively in sequence among antibodies and are used in the binding and specificity of each particular antibody for its particular antigen. However, the variability is not evenly distributed throughout the variable domains of antibodies. It is concentrated in three segments called complementarity-determining regions (CDRs) or hypervariable regions both in the light-chain and the heavy-chain variable domains. The more highly conserved portions of variable domains are called the framework (FR). The variable domains of native heavy and light chains each comprise four FR regions, largely adopting a b-sheet configuration, connected by three CDRs, which form loops connecting, and in some cases forming part of, the b-sheet structure. The CDRs in each chain are held together in close proximity by the FR regions and, with the CDRs from the other chain, contribute to the formation of the antigen-binding site of antibodies (see Kabat et al., Sequences of Proteins of Immunological Interest, Fifth Edition, National Institute of Health, Bethesda, Md. (1991)). The constant domains are not involved directly in binding an antibody to an antigen, but exhibit various effector functions, such as participation of the antibody in antibody-dependent cellular toxicity.

[0105] Papain digestion of antibodies produces two identical antigen-binding fragments, called “Fab” fragments, each with a single antigen-binding site, and a residual “Fc” fragment, whose name reflects its ability to crystallize readily. Pepsin treatment yields an F(ab′)2 fragment that has two antigen-combining sites and is still capable of cross-linking antigen.

[0106] “Fv” is the minimum antibody fragment which contains a complete antigen-recognition and -binding site. In a two-chain Fv species, this region consists of a dimer of one heavy- and one light-chain variable domain in tight, non-covalent association. In a single-chain Fv species (scFv), one heavy- and one light-chain variable domain can be covalently linked by a flexible peptide linker such that the light and heavy chains can associate in a “dimeric” structure analogous to that in a two-chain Fv species. It is in this configuration that the three CDRs of each variable domain interact to define an antigen-binding site on the surface of the VH-VL dimer. Collectively, the six CDRs confer antigen-binding specificity to the antibody. However, even a single variable domain (or half of an Fv comprising only three CDRs specific for an antigen) has the ability to recognize and bind antigen, although at a lower affinity than the entire binding site. For a review of scFv see Pluckthun, in The Pharmacology of Monoclonal Antibodies, vol. 113, Rosenburg and Moore eds., Springer-Verlag, New York, pp. 269-315 (1994).

[0107] The Fab fragment also contains the constant domain of the light chain and the first constant domain (CH1) of the heavy chain. Fab′ fragments differ from Fab fragments by the addition of a few residues at the carboxy terminus of the heavy chain CH1 domain including one or more cysteines from the antibody hinge region. Fab′-SH is the designation herein for Fab′ in which the cysteine residue(s) of the constant domains bear a free thiol group. F(ab′)2 antibody fragments originally were produced as pairs of Fab′ fragments which have hinge cysteines between them. Other chemical couplings of antibody fragments are also known.

[0108] There are five major classes of immunoglobulins: IgA, IgD, IgE, IgG, and IgM, and several of these can be further divided into subclasses (isotypes), e.g., IgG1, IgG2, IgG3, IgG4, IgA1, IgA2. The heavy-chain constant domains that correspond to the different classes of immunoglobulins are called a, d, e, g, and m, respectively. The subunit structures and three-dimensional configurations of different classes of immunoglobulins are well known. Engineered variants of immunoglobulin subclasses, including those that increase or decrease immune effector functions, half-life, or serum-stability, are also encompassed by this terminology.

[0109] “Antibody fragment”, and all grammatical variants thereof, as used herein are defined as a portion of an intact antibody comprising the antigen binding site or variable region of the intact antibody, wherein the portion is free of the constant heavy chain domains (i.e. CH2, CH3, and CH4, depending on antibody isotype) of the Fc region of the intact antibody. Examples of antibody fragments include Fab, Fab′, Fab′-SH, F(ab′)2, and Fv fragments; diabodies; any antibody fragment that is a polypeptide having a primary structure consisting of one uninterrupted sequence of contiguous amino acid residues (referred to herein as a “single-chain antibody fragment” or “single chain polypeptide”), including without limitation (1) single-chain Fv (scFv) molecules (2) single chain polypeptides containing only one light chain variable domain, or a fragment thereof that contains the three CDRs of the light chain variable domain, without an associated heavy chain moiety and (3) single chain polypeptides containing only one heavy chain variable region, or a fragment thereof containing the three CDRs of the heavy chain variable region, without an associated light chain moiety; and multispecific or multivalent structures formed from antibody fragments. In an antibody fragment comprising one or more heavy chains, the heavy chain(s) can contain any constant domain sequence (e.g. CH1 in the IgG isotype) found in a non-Fc region of an intact antibody, and/or can contain any hinge region sequence found in an intact antibody, and/or can contain a leucine zipper sequence fused to or situated in the hinge region sequence or the constant domain sequence of the heavy chain(s).

[0110] The term “monoclonal antibody” (mAb) as used herein refers to an antibody obtained from a population of substantially homogeneous antibodies, i.e., the individual antibodies comprising the population are identical except for possible naturally occurring mutations that may be present in minor amounts. Monoclonal antibodies are highly specific, being directed against a single antigenic site. Each mAb is directed against a single determinant on the antigen. In addition to their specificity, the monoclonal antibodies are advantageous in that they can be synthesized by hybridoma culture, uncontaminated by other immunoglobulins. The modifier “monoclonal” indicates the character of the antibody as being obtained from a substantially homogeneous population of antibodies, and is not to be construed as requiring production of the antibody by any particular method. For example, the monoclonal antibodies to be used in accordance with the present invention may be made in an immortalized B cell or hybridoma thereof, or may be made by recombinant DNA methods.

[0111] An “isolated” antibody is one which has been identified and separated and/or recovered from a component of its natural environment. Contaminant components of its natural environment are materials which would interfere with diagnostic or therapeutic uses for the antibody, and may include enzymes, hormones, and other proteinaceous or nonproteinaceous solutes. In some embodiments, the antibody will be purified (1) to greater than 75% by weight of antibody as determined by the Lowry method, and most preferably more than 80%, 90% or 99% by weight, or (2) to homogeneity by SDS-PAGE under reducing or nonreducing conditions using Coomassie blue or, preferably, silver stain. Isolated antibody includes the antibody in situ within recombinant cells since at least one component of the antibody's natural environment will not be present. Ordinarily, however, isolated antibody will be prepared by at least one purification step.

[0112] The terms “specific binding,” “specifically binds,” and the like, refer to non-covalent or covalent preferential binding to a molecule relative to other molecules or moieties in a solution or reaction mixture (e.g., an antibody specifically binds to a particular polypeptide or epitope relative to other available polypeptides). In some embodiments, the affinity of one molecule for another molecule to which it specifically binds is characterized by a Kd (dissociation constant) of 10-5 M or less (e.g., 10-6 M or less, 10-7 M or less, 10-8 M or less, 10-9 M or less, 10-10 M or less, 10-11 M or less, 10-12 M or less, 10-13 M or less, 10-14 M or less, 10-15 M or less, or 10-16 M or less). “Affinity” refers to the strength of binding, increased binding affinity being correlated with a lower Kd.

[0113] The term “specific binding member” as used herein refers to a member of a specific binding pair (i.e., two molecules, usually two different molecules, where one of the molecules, e.g., a first specific binding member, through non-covalent means specifically binds to the other molecule, e.g., a second specific binding member).

### Therapy and Diagnosis

[0114] Depletion of pathogenic B cells may comprise, for example, targeting antibodies to markers present on actively infected B cells, e.g. target pathogenic EBV-infected B cells, e.g. by therapies directed to one or more of cell-surface EBV proteins: BILF-1, LMP1 and LMP2. Antibodies may be conjugated to a cytotoxic agent, e.g. tubulin polymerization inhibitors, e.g. maytansinoids (maytansine), dolastatins, auristatin drug analogs, cryptophycin; duocarmycin derivatives, e.g. CC-1065 analogs, duocarmycin; enediyne antibiotics, e.g. esperamicin, calicheamicin; pyrrolobenzodiazepine (PBD); and the like. Other targeted agents include anti-B cell antibodies, e.g. anti-CD20 antibodies, e.g. rituximab; anti-CD19 antibodies; anti-CD38 antibodies, e.g. daratumumab; EBV-specific CAR T cells, and the like.

[0115] Inhibition of B cells with active EBV infection may utilize, for example, inhibition of specific tyrosine kinase proteins. Such inhibitor include, without limitation, BTK inhibitors. BTK signaling influences antigen presentation on B cells and is essential to the production of antibodies, proinflammatory cytokines and chemokines, and cell adhesion molecules. Examples of useful inhibitors include ibrutinib, evobrutinib, PRN2246 (SAR442168), and BIIB091.

[0116] Inhibition of active EBV infection may utilize small molecules that directly interfere with activating signaling cascades initiated by EBV-encoded proteins, e.g. LMP-1 and LMP-2.

[0117] Therapeutic entities are often administered as pharmaceutical compositions comprising an active therapeutic agent and a other pharmaceutically acceptable excipient. The preferred form depends on the intended mode of administration and therapeutic application. The compositions can also include, depending on the formulation desired, pharmaceutically-acceptable, non-toxic carriers or diluents, which are defined as vehicles commonly used to formulate pharmaceutical compositions for animal or human administration. The diluent is selected so as not to affect the biological activity of the combination. Examples of such diluents are distilled water, physiological phosphate-buffered saline, Ringer's solutions, dextrose solution, and Hank's solution. In addition, the pharmaceutical composition or formulation may also include other carriers or nontoxic, nontherapeutic, nonimmunogenic stabilizers and the like.

[0118] In still some other embodiments, pharmaceutical compositions can also include large, slowly metabolized macromolecules such as proteins, polysaccharides such as chitosan, polylactic acids, polyglycolic acids and copolymers (such as latex functionalized Sepharose™, agarose, cellulose, and the like), polymeric amino acids, amino acid copolymers, and lipid aggregates (such as oil droplets or liposomes).

[0119] Also provided are combination therapy methods, where the combination may provide for additive or synergistic benefits. Combinations of a peptide or antibody may be obtained with a second agent selected from one or more of the general classes of drugs commonly used in the non-antigen specific treatment of autoimmune disease, which include corticosteroids and disease modifying drugs; or from an antigen-specific agent. Corticosteroids, e.g. prednisone, methylpredisone, prednisolone, solumedrol, etc. have both anti-inflammatory and immuno activity. They can be given systemically or can be injected locally. Corticosteroids are useful in early disease as temporary adjunctive therapy while waiting for disease modifying agents to exert their effects. Corticosteroids are also useful as chronic adjunctive therapy in patients with severe disease.

[0120] Certain compounds are known to activate EBV in B cells and therefore induce expression of BILF-1, and other lytic/activated proteins, as well as possibly LMP-1, LMP-2. These compounds include but are not restricted to decitabine, sodium butyrate, bortezomib, and compounds described by Tikhmyanova et al. (Bioorg Med Chem Lett., 2014 and 2019). These compounds could be used in conjunction with anti-EBV antibodies and other compounds to increase expression of EBV-encoded target molecules for depletion of EBV-infected B cells.

[0121] Disease modifying drugs are also useful in combined therapy. These agents include methotrexate, leflunomide, etanercept, infliximab, adalimumab, anakinra, rituximab, CTLA4-Ig (abatacept), antimalarials, gold salts, sulfasalazine, d-penicillamine, cyclosporin A, cyclophosphamide azathioprine; and the like. Treatments for MS may include interferon β, Copaxone, and anti-VLA4, which reduce relapse rate. MS is also treated with immunosuppressive agents including methylprednisolone, other steroids, methotrexate, cladribine and cyclophosphamide.

[0122] Combination therapies may be sequentially staged, provided in a co-administration formulation, or concomitant administration during the same time period. “Concomitant administration” of a known therapeutic drug with a pharmaceutical composition of the present invention means administration of the drug and peptide at such time that both the known drug and the composition of the present invention will have a therapeutic effect. Such concomitant administration may involve concurrent (i.e. at the same time), prior, or subsequent administration of the drug with respect to the administration of a compound of the invention. A person of ordinary skill in the art would have no difficulty determining the appropriate timing, sequence and dosages of administration for particular drugs and compositions of the present invention.

[0123] Drug, peptides, antibodies, etc. can serve as the active ingredient in pharmaceutical compositions formulated for the treatment of various disorders as described above. The active ingredient is present in a therapeutically effective amount, i.e., an amount sufficient when administered to treat a disease or medical condition mediated thereby, in particular by reducing the activity of inflammatory lymphocytes. The compositions can also include various other agents to enhance delivery and efficacy, e.g. to enhance delivery and stability of the active ingredients.

[0124] Thus, for example, the compositions can also include, depending on the formulation desired, pharmaceutically-acceptable, non-toxic carriers or diluents, which are defined as vehicles commonly used to formulate pharmaceutical compositions for animal or human administration. The diluent is selected so as not to affect the biological activity of the combination. Examples of such diluents are distilled water, buffered water, physiological saline, PBS, Ringer's solution, dextrose solution, and Hank's solution. In addition, the pharmaceutical composition or formulation can include other carriers, or non-toxic, nontherapeutic, nonimmunogenic stabilizers, excipients and the like. The compositions can also include additional substances to approximate physiological conditions, such as pH adjusting and buffering agents, toxicity adjusting agents, wetting agents and detergents. The composition can also include any of a variety of stabilizing agents, such as an antioxidant.

[0125] Complexes with various well-known compounds can be used to enhance the in vivo stability of a drug or polypeptide, or otherwise enhance its pharmacological properties (e.g., increase the half-life of the polypeptide, reduce its toxicity, enhance solubility or uptake). Examples of such modifications or complexing agents include sulfate, gluconate, citrate and phosphate. The polypeptides of a composition can also be complexed with molecules that enhance their in vivo attributes. Such molecules include, for example, carbohydrates, polyamines, amino acids, other peptides, ions (e.g., sodium, potassium, calcium, magnesium, manganese), and lipids.

[0126] Further guidance regarding formulations that are suitable for various types of administration can be found in Remington's Pharmaceutical Sciences, Mace Publishing Company, Philadelphia, Pa., 17th ed. (1985). For a brief review of methods for drug delivery, see, Langer, Science 249:1527-1533 (1990).

[0127] The pharmaceutical compositions can be administered for prophylactic and/or therapeutic treatments. Toxicity and therapeutic efficacy of the active ingredient can be determined according to standard pharmaceutical procedures in cell cultures and/or experimental animals, including, for example, determining the LD50 (the dose lethal to 50% of the population) and the ED50 (the dose therapeutically effective in 50% of the population). The dose ratio between toxic and therapeutic effects is the therapeutic index and it can be expressed as the ratio LD50/ED50. Compounds that exhibit large therapeutic indices are preferred.

[0128] The data obtained from cell culture and/or animal studies can be used in formulating a range of dosages for humans. The dosage of the active ingredient typically lies within a range of circulating concentrations that include the ED50 with little or no toxicity. The dosage can vary within this range depending upon the dosage form employed and the route of administration utilized.

[0129] The pharmaceutical compositions described herein can be administered in a variety of different ways. Examples include administering a composition containing a pharmaceutically acceptable carrier via oral, intranasal, rectal, topical, intraperitoneal, intravenous, intramuscular, subcutaneous, subdermal, transdermal method.

[0130] Formulations suitable for parenteral administration, such as, for example, by intravenous, intramuscular, intradermal, intraperitoneal, and subcutaneous routes, include aqueous and non-aqueous, isotonic sterile injection solutions, which can contain antioxidants, buffers, bacteriostats, and solutes that render the formulation isotonic with the blood of the intended recipient, and aqueous and non-aqueous sterile suspensions that can include suspending agents, solubilizers, thickening agents, stabilizers, and preservatives.

[0131] The components used to formulate the pharmaceutical compositions are preferably of high purity and are substantially free of potentially harmful contaminants (e.g., at least National Food (NF) grade, generally at least analytical grade, and more typically at least pharmaceutical grade). Moreover, compositions intended for in vivo use are preferably sterile. To the extent that a given compound must be synthesized prior to use, the resulting product is preferably substantially free of any potentially toxic agents, such as any endotoxins, which may be present during the synthesis or purification process. Compositions for parental administration are also preferably sterile, substantially isotonic and made under GMP conditions.

[0132] The compositions may be administered in a single dose, or in multiple doses, usually multiple doses over a period of time, e.g. daily, every-other day, weekly, semi-weekly, monthly etc. for a period of time sufficient to reduce severity of the inflammatory disease, which may comprise 1, 2, 3, 4, 6, 10, or more doses.

[0133] Determining a therapeutically or prophylactically effective amount can be done based on animal data using routine computational methods. In one embodiment, the therapeutically or prophylactically effective amount contains between about 0.1 mg and about 1 g of protein. In another embodiment, the effective amount contains between about 1 mg and about 100 mg of protein. In a further embodiment, the effective amount contains between about 10 mg and about 50 mg of the protein. The effective dose will depend at least in part on the route of administration. The dose may be from about 0.1 μg/kg patient weight; about 1 μg/kg; about 100 μg/kg; to about 10 mg/kg.

[0134] In methods of use, an effective dose of an agent of the invention is administered alone, or combined with additional active agents for the treatment of a condition as listed above. The effective dose may be from about 1 ng/kg weight, 10 ng/kg weight, 100 ng/kg weight, 1 μg/kg weight, 10 μg/kg weight, 25 μg/kg weight, 50 μg/kg weight, 100 μg/kg weight, 250 μg/kg weight, 500 μg/kg weight, 750 μg/kg weight, 1 mg/kg weight, 5 mg/kg weight, 10 mg/kg weight, 25 mg/kg weight, 50 mg/kg weight, 75 mg/kg weight, 100 mg/kg weight, 250 mg/kg weight, 500 mg/kg weight, 750 mg/kg weight, and the like. The dosage may be administered multiple times as needed, e.g. every 4 hours, every 6 hours, every 8 hours, every 12 hours, every 18 hours, daily, every 2 days, every 3 days, weekly, and the like. The dosage may be administered orally.

[0135] The compositions can be administered in a single dose, or in multiple doses, usually multiple doses over a period of time, e.g. daily, every-other day, weekly, semi-weekly, monthly etc. for a period of time sufficient to reduce severity of the inflammatory disease, which can comprise 1, 2, 3, 4, 6, 10, or more doses.

[0136] Determining a therapeutically or prophylactically effective amount of an agent according to the present methods can be done based on animal data using routine computational methods. The effective dose will depend at least in part on the route of administration.

[0137] The cross-reactive peptides are also useful in methods of characterizing the immune profile of an individual, particularly for determining the presence of pathogenic B cells having specificity for these peptides in an individual suspected of having MS or related inflammatory conditions. The methods can comprise contacting a sample comprising B cells from the individual with an immunogenic, cross-reactive peptide, and determining the presence of a B cell or antibody response to the peptide. The sample may be any biological sample that comprises B cells or antibodies, including peripheral blood, lymph node samples, CSF, and the like. The response can be determined by direct binding assays, by determining the presence of B cells associated with specificity to these peptide antigens, by determining the presence of EBV activation markers on B cells, by frequency determination; and the like as known in the art.

### Antigen-Specific Immunotherapy

[0138] Antigen-specific immunotherapy aims to take advantage of tolerization, immune deviation and the induction of Tregs in order to promote autoantigen-specific tolerance. Autoimmune diseases are potentially be treated by eliminating pathogenic cells that are specific for autoantigens or by blocking the immune response directed by autoantigen-specific cells. Another method to induce immunological changes is by manipulation of dendritic cells (DCs). DCs are essential to the induction phase of the immune response and are therefore critically important in determining whether a response toward an antigen will be inflammation or tolerance. DCs can influence if naïve cells will undergo deletion, anergy, or differentiation. DC responses to a specific antigen are influenced by the tissue environment and innate stimuli associated with that antigen. Therapies may target DCs to induce tolerance.

[0139] For example, the cross-reactive EBNA-1 epitope or glialcam epitope may be administered via a tolerogenic route, e.g. by oral or nasal administration of soluble or oligomerized peptides. Alternatively the cross-reactive peptide can be used as the basis for an altered peptide ligand (APLs). Altered peptide ligands are analogues derived from an antigenic peptide that comprise amino acid substitutions at contact residues, e.g. a substitution of 1, 2 3 amino acids. Altered peptide ligands can specifically antagonize and inhibit activation induced by the cognate antigenic peptide. APLs compete with the native peptide for binding but bind with lower affinity, and can thereby function as antagonists or partial agonists.

[0140] In some embodiments a peptide is formulated for immunization to generate an antigen-specific tolerance, e.g. by subcutaneous or oral administration of a cross-reactive peptide(s). In some embodiments a cross-reactive peptide is formulated for trans-dermal delivery. In some embodiments, a method of inducing immune tolerance comprises trans-dermal administration of cross-reactive peptide(s) this formulated. An effective dose may be a low dose, e.g. a dose of less than about 5 mg, less than about 2.5 mg, less than about 1 mg, less than about 500 μg, less than about 100 μg. In some embodiments a cross-reactive peptide is encapsulated into mannosylated liposomes to enhance enhanced the uptake of the peptides by dendritic cells.

[0141] As an alternative to peptide vaccination, DNA vaccines can be formulated in a tolerizing vector of genetically engineered DNA that encodes one or more of the cross-reactive peptides disclosed herein. A tolerizing vector can be formulated and administered by intramuscular injection, for example in a plasmid backbone modified in such a way that it could lead to favorable immunological changes in patients with MS, e.g. reduction in the number of immunostimulatory CpG motifs and increase in the number of immunoinhibitory GpG motifs). A lower dose may be preferred, e.g. a dose of less than 5 mg, e.g. a dose of less than about 5 mg, less than about 2.5 mg, less than about 1 mg, less than about 500 μg, less than about 100 μg.

[0142] DNA vectors, for example as described in U.S. Pat. No. 10,098,935 have been shown to provide for tolerization (i.e., induction of antigen-specific tolerance). Such a vector is referred to as a tolerizing vector. The vector can be administered, for example, by local injection, including intramuscular injection, where the vector encodes a cross-reactive adenovirus peptide or protein comprising the peptide, and further comprises a promoter sequence operably linked the nucleic acid sequence; and a DNA backbone, linked to the promoter sequence and the nucleic acid sequence, comprising 4 or fewer immunostimulatory CpG motifs. The cross-reactive peptide may be modified by 1, 2, 3, or more amino acid residues to be altered from the naturally occurring polypeptide.

[0143] The invention has been described in terms of particular embodiments found or proposed by the present inventor to comprise preferred modes for the practice of the invention. It will be appreciated by those of skill in the art that, in light of the present disclosure, numerous modifications and changes can be made in the particular embodiments exemplified without departing from the intended scope of the invention. Due to biological functional equivalency considerations, changes can be made in protein structure without affecting the biological action in kind or amount. All such modifications are intended to be included within the scope of the appended claims.

### Kits

[0144] Also provided are kits for use in the subject methods. The subject kits include any combination of components and compositions for performing the subject methods. In some embodiments, a kit can include one or more of the following: a cross-reactive EBNA-1 or glialcam peptide for determining the presence of reactive cells or antibodies; a cross-reactive EBNA-1 or glialcam peptide for inducing tolerance; reagents for detecting EBV-driven pathogenic B cells, a vaccine delivery device, a suitable buffer and any combination thereof.

[0145] In addition to the above components, the subject kits may further include (in certain embodiments) instructions for practicing the subject methods. These instructions may be present in the subject kits in a variety of forms, one or more of which may be present in the kit. One form in which these instructions may be present is as printed information on a suitable medium or substrate, e.g., a piece or pieces of paper on which the information is printed, in the packaging of the kit, in a package insert, and the like. Yet another form of these instructions is a computer readable medium, e.g., diskette, compact disk (CD), flash drive, and the like, on which the information has been recorded. Yet another form of these instructions that may be present is a website address which may be used via the internet to access the information at a removed site.

### EXAMPLES

[0146] The following examples are put forth so as to provide those of ordinary skill in the art with a complete disclosure and description of how to make and use the present invention, and are not intended to limit the scope of what the inventors regard as their invention nor are they intended to represent that the experiments below are all or the only experiments performed. Efforts have been made to ensure accuracy with respect to numbers used (e.g. amounts, temperature, etc.) but some experimental errors and deviations should be accounted for. Unless indicated otherwise, parts are parts by weight, molecular weight is weight average molecular weight, temperature is in degrees Celsius, and pressure is at or near atmospheric. Standard abbreviations may be used, e.g., room temperature (RT); base pairs (bp); kilobases (kb); picoliters (pl); seconds (s or sec); minutes (m or min); hours (h or hr); days (d); weeks (wk or wks); nanoliters (nl); microliters (ul); milliliters (ml); liters (L); nanograms (ng); micrograms (ug); milligrams (mg); grams ((g), in the context of mass); kilograms (kg); equivalents of the force of gravity ((g), in the context of centrifugation); nanomolar (nM); micromolar (uM), millimolar (mM); molar (M); amino acids (aa); kilobases (kb); base pairs (bp); nucleotides (nt); intramuscular (i.m.); intraperitoneal (i.p.); subcutaneous (s.c.); and the like.

### Example 1

### The B Cell Repertoire in Multiple Sclerosis Reveals Molecular Mimicry Between EBNA1 and GlialCAM

[0147] Multiple sclerosis (MS) is a heterogenous autoimmune disease where autoreactive T and B lymphocytes attack the myelin sheaths of the central nervous system (CNS). Lymphocytes in the cerebro-spinal fluid (CSF) are directly involved in inflammation of the adjacent CNS and accessible to investigation. Intrathecal B cells secrete oligoclonal immunoglobulin, distinct from the immunoglobulin in the circulation, suggesting continual activation of specific plasmablasts by a private antigen. However, phenotype, function, and antigen-specificity of autoreactive B cells are not well understood. Molecular mimicry between viruses and CNS proteins has been proposed as a pathogenic factor for MS, but identification of cross-reactive antigens has been challenging. Here we describe phenotypic differences of B cell phenotypes in blood and CSF of MS patients, which implicate plasmablasts in MS pathogenesis. Sequencing of the paired-chain antibody repertoire of over 15,000 single-cell sorted plasmablasts in CSF and blood of 9 MS patients revealed ongoing intrathecal somatic hypermutation and antigen-specific clonal expansion of plasmablasts in the CSF. We tested over 140 potentially pathogenic antibodies derived from CSF plasmablasts against a spectrum of viruses implicated in MS pathogenesis. We identified a CSF-plasmablast derived antibody that binds the Epstein-Barr Virus (EBV) transcription factor EBNA1 and cross-reacts to the glial cellular adhesion molecule GlialCAM. Immunization of mice with the identified EBNA1 epitope aggravates the mouse model of MS. ˜ 15% of MS patients carry antibodies that cross-react to EBNA1 and GlialCAM. Together, our results suggest that EBNA1-reactive antibodies EBV can cross-react with the CNS-specific membrane protein GlialCAM and induce neuroinflammation, thereby exacerbating MS.

[0148] Here we show that a large fraction of B cells in the CSF are activated plasmablasts (PB) that are distinct from PB in blood with regard to activation and trafficking markers. To understand their antigen-specificity, we sequenced the single-cell paired-chain BCR repertoire of more than 1600 B cells from CSF and over 13,000 PB from blood of 9 MS patients and found substantially higher clonality and skewed IGHV gene usage in the CSF, indicative of ongoing intrathecal somatic hypermutation and antigen-specific proliferation. 148 BCR sequences representative of large clonal expansions were expressed as recombinant monoclonal antibodies (mABs) and tested for reactivity to viral proteins and peptide, with an emphasis on Epstein Barr Virus (EBV).

[0149] The CSF-derived mAB MS39p2w174 was discovered, which binds to EBNA1 within a region previously described to be associated with higher serum reactivity in MS patients (AA386-405). MS39p2w174 cross-reacts to the glial cell adhesion molecule GlialCAM, a type 1 membrane protein expressed on oligodendrocytes and astrocytes, in particular at the astrocytic perivascular endfeet that maintain blood brain barrier integrity. GlialCAM aids the correct expression of aquaporin-4, an important B cell antigen in neuromyelitis optica. In addition, it enables cell-cell contacts by homo-oligomerization and is indispensable for glial chloride and water homeostasis as a beta-subunit of the MLC1 and an auxiliary subunit of CLC2. We mapped the EBNA1 and GlialCAM epitopes in detail, including a 2.5 Å crystal structure of the mAB/EBNA1 peptide complex. We can show that the unmutated germline sequence of MS39p2w174 is already prone to bind EBNA1, while additional mutations increase affinity to GlialCAM. Interaction with GlialCAM is facilitated by a serine phosphorylation N-terminal of the central epitope. Similar antibodies against GlialCAM are generated in mice upon immunization with EBNA1 AA386-405, which aggravates the mouse model of MS, experimental autoimmune encephalomyelitis (EAE). Elevated anti-GlialCAM serum reactivity was observed in MS patients in comparison to healthy individuals.

[0150] IgG+ plasmablasts dominate the CSF B cell compartment in MS patients. CSF and blood samples were obtained from 9 MS patients during the initial onset of disease (clinically isolated syndrome, CIS, n=5) or an acute episode of relapsing-remitting MS (RRMS, n=4) (table 1) and B cells were sorted by flow cytometry. Approximately 30% of B cells in the CSF exhibit an activated plasmablast (PB) phenotype (CD19+CD20low CD27+CD38+(PB), median: 29.8%, SD: 20), while only a small fraction of ˜4% of B cells in the blood are PB (median: 4.1%, SD: 12.2; FIG. 1A). Conversely, naïve B cells are diminished in the CSF, while unswitched and switched memory as well as double negative B cell numbers are comparable in blood and CSF. Profound phenotypic differences between blood and CSF were detected in PB but not in non-PB B cells: (i) Blood PB express high levels of the trafficking receptor a4 integrin, whereas PB in the CSF abate α4 over time (FIG. 1B). (ii) PB in the CSF express higher levels of HLA-DR than their blood-derived counterparts (FIG. 1C,D), emphasizing their role in antigen presentation in the CSF and CNS. Similar differences were not seen in non-PB B cells. Of note, HLA-DR expression was independent of the HLA-DRB1*15:01 genotype (HLA-DR15) (table 1 and FIG. 1E,F). (iii) The predominant immunoglobulin (lg) class within the PB compartment in CSF is IgG, while both IgA and IgG are the main classes in blood-derived PB (FIG. 1E). In contrast, non-PB B cells express similar Ig-classes in CSF and blood (FIG. 1F). These differences suggest an elevated pathogenic role of PB in MS.

[0151] The CSF PB immune repertoire is highly clonal and skewed. To gain a comprehensive overview of the intrathecal antigen-specific B cell response in MS, we sorted single PB from blood and single B cells from CSF of MS patients by flow cytometry and sequenced full-length paired heavy-chain (HC) and light-chain (LC) VDJ regions using our in-house plate-based single-cell sequencing technology. 13,231 paired sequences from blood PB and 1,689 from CSF B cells passed filter thresholds. In comparison to the repertoire of blood PB, the repertoire of CSF PB is significantly more clonal and largely dominated by IgG (FIG. 1G, H), suggesting antigen-specific proliferation of a few clones. Not surprisingly, non-PB B cells in the CSF are less clonal and express IgA and IgM more frequently than PB. While mutation counts in IGHV and IGLV genes did not differ significantly between PB in blood and CSF, HC-CDR3 lengths are on average 0.94 amino acids longer in CSF PB, indicating ongoing intrathecal somatic hypermutation. The repertoire in the CSF is skewed towards more preferential usage of 5 IGHV chains: IGHV4-59, IGHV4-39, IGHV4-34, IGHV1-2, and IGHV3-7 (FIG. 1I), which for the most part is in line with previous reports, and indicates that a select group of MS-related antigens in the CSF drive PB survival and proliferation in the CSF, with a few distinct immunoglobulin germline genes being predestined to bind them.

[0152] Clonal PB are the main source of oligoclonal bands. We hypothesized that clonally expanded PB are the main source of intrathecal oligoclonal bands (OCB) in MS. We purified immunoglobulin from CSF samples and sequenced the variable region amino acid sequences by mass spectrometry. As expected, clonally sequences were readily identified, whereas only fourty percent of singleton sequences detected 39.6% (FIG. 1J). Highly abundant immunoglobulins, which were identified with ten or more peptide-spectral matches (PSM>10) likely correlate with oligoclonal bands. These sequences aligned almost exclusively to clonally expanded B cell sequences (FIG. 1K), suggesting that they are the source of the oligoclonal bands. This correlation holds true for PB, which are more clonal than non-PB B cells. Taken together, clonal PB are likely the main source of antibodies and OCB in the CSF.

[0153] CSF-derived monoclonal antibodies bind EBV antigens. A total of 148 sequences from the CSF repertoires were selected for recombinant expression, each one representative of a major clonal expansion. To test anti-viral reactivities of the selected mABs, they were probed on a planar protein microarray representing EBV lysates, 23 recombinant latent and lytic EBV proteins, 240 peptides spanning four prominent EBV proteins, as well as 7 lysates of other MS-associated viruses, including measles, rubella, and varicella-zoster virus (VZV)³⁰ (FIG. 2A,B). One-third of the expressed mABs bound to EBV proteins and peptides and ˜20% to other viruses, in particular to VZV and CMV (FIG. 2A). Interestingly, half of the VZV-reactive antibodies cross-reacted to CMV and EBV, indicative of broader antigens common to herpes viruses.

[0154] Interestingly, we found mABs in 6 out of 9 patients that bound the transcription factor EBNA1 (FIG. 2A), and mABs binding to EBNA1 peptides in 8 out of 9 patients (FIG. 2B). Anti-EBNA1-reactivity has been implicated in MS pathogenesis and the region AA365-425 (“MS-associated epitope” in FIG. 2B) is known to elicit a stronger antibody response in MS patients than in healthy individuals. Protein and peptide arrays revealed that our mAB MS39p2w174 binds EBNA1 within this region (AA386-405, FIG. 2B). The interaction was verified by western blot analysis using full-length and truncated EBNA1 proteins (FIG. 2C) and ELISA-based peptide scans spanning full-length EBNA1 (20mer peptides, 13AA overlap, FIG. 2D). Alanine-scanning determined the proline-rich region AA394-399 to be the central epitope (FIG. 2E). Taken together, we identified multiple mABs directed against EBV and in particular MS39p2w174, which binds a well-described MS-associated epitope of EBNA1.

[0155] Crystal structure reveals key residues of mAB-EBNA1 interaction. While the presence of antibodies against the broader EBNA1 region AA365-425 is well established in MS patients, their relevance to MS pathology has remained elusive. Efforts to model its structure has done little to understand the epitopes functional properties. To understand its immunogenicity and impact on MS pathology in detail, we solved the crystal structure of MS39p2w174 in complex with EBNA1 AA386-405 at a resolution of 2.5 Å (FIG. 2F-J, PDB ID: 7K7R). It confirmed close interactions of the peptide residues P394-P398 with all complementary determining regions (CDRs) but the very short LCDR2. Residues Tyr31 and Tyr38 on LCDR1 together with Trp38 on HCDR1 and Pro108, Pro109, and Tyr114 on HCDR3 create a hydrophobic cage for the peptide's first two prolines Pro394 and Pro395 and the proximal side chain of Arg396 (FIG. 2H-J). The C-terminal end of the antibody binding groove is wider and Pro398 is carried by a large aromatic tryptophan residue (Trp114 in HCDR1) on the bottom of the groove (FIG. 2G,H,J). The central arginines Arg395 and Arg396 engage in close polar interactions (<3.1 Å) with residues on HCDR2, HCDR3, and HC framework region 2. Contrary to the results of our alanine scan (FIG. 2E), Pro399 does not appear to interact directly with antibody side chains, and we assume that alanine at position 399 disrupts the conformation of the three prolines Pro398-Pro400 causing steric hindrance within the binding pocket.

[0156] The encoding IGHV gene of MS39p2w174 is IGHV3-7, one of the IGHV chains over-represented in CSF (FIG. 1I). Interestingly, all but one of the residues that directly interact with EBNA1 are unmutated germline (GL) residues (IGHV3-7, IGHJ4, IGKV2-30, IGKJ1). We therefore hypothesized that the unmutated ancestor of MS39p2w174 might have an inert propensity to bind EBNA1 AA386-405. Indeed, we could show that GL binds to EBNA1 with only slightly lower affinity than MS39p2w174 (K_{D} MS39p2w174: 1.99 nM, GL: 4.19 nM) (FIG. 2K,L).

[0157] Molecular mimicry between EBNA1 AA386-405 and GlialCAM. Studying a mAB as opposed to patient-derived sera and CSF samples allows for direct identification of molecular mimicry with human proteins. We probed mAB MS39p2w174 on a HuProt protein microarray, which represents >20,000 proteins spanning the entire human proteome. Glial cell adhesion molecule (GlialCAM) was identified as the top binding partner to MS39p2w174 (FIG. 3A). GlialCAM is a cell adhesion molecule that is almost exclusively expressed in the CNS (www.proteinatlas.org), mainly in astrocytes and oligodendrocytes. In multiple sclerosis, it has been found to be decreased in acute and chronic MS plaques, but elevated in chronic-active plaques. GlialCAM AA337-385 was identified as a binding partner for MS39p2w174 on a 49mer phage display representing the whole human proteome (356 out of 10⁵ reads, only identified by MS39p2w174 in a set of 300 mABs). Binding of MS39p2w174 to the intracellular domain (ICD, AA262-416) of GlialCAM was confirmed on ELISA (FIG. 3B) and western blot (FIG. 3C). Affinity measurements with bio-layer interferometry revealed higher affinity of MS39p2w174 to GlialCAM (K_{D}: 190 PM) vs. EBNA1 (K_{D}: 1.99 nM). This is in contrast to the unmutated GL mAB, which binds GlialCAM with lower affinity (K_{D} GlialCAM: 10.46 nM, K_{D} EBNA1: 4.19 nM) (FIG. 2K,L and FIG. 3D,E). Evidently, while GL harbors a propensity to bind to EBNA1, somatic hypermutation during development of MS39p2w174 has increased its affinity to the CNS mimic GlialCAM by 2 orders of magnitude.

[0158] Phosphorylation at GlialCAM Ser376 enables binding of MS39p2w174. The EBNA1 epitope AA386-405 is located between the protein's long N-terminal Gly-Ala-rich low-complexity region (AA90-380) and its highly structured DNA-binding domain (AA: 461-607, PDB: 1B3T). On GlialCAM, the above-mentioned region AA337-385 is located at the C-terminal end of the ICD and contains a proline-rich region that closely resembles the central epitope of EBNA1 (FIG. 3F). MS39p2w174 detects both proteins on western blots under denaturing conditions (FIG. 2C, FIG. 3C), suggesting linear epitopes for both targets. This is in line with predictions that both epitopes are located in intrinsically disordered regions of the respective protein (FIG. 3G, H). However, while MS39p2w174 binds the EBNA1 peptide AA386-405 with high affinity (K_{D}: 2.67 nM), its affinity to GlialCAM peptide AA370-389 is drastically lower (K_{D}: 302 nM). As the intracellular domain of GlialCAM is heavily phosphorylated, and post-translational modifications often determine antibody-antigen interactions, we tested if phosphorylation at one of the 4 serine residues surrounding the central epitope region (residues Ser376, 377, 383, and 384) could increase binding affinity of MS39p2w174 to GlialCAM AA370-389. Indeed, phosphorylation at Ser376 facilitates MS39p2w174 interaction with the peptide (K_{D}: 6.1 nM) and additional phosphorylation of Ser377 further enhances binding affinity (K_{D}: 3.73 nM) (FIG. 3I-K). In contrast, citrullination of arginine residues Arg373, 380, and 387 did not alter peptide binding to MS39p2w174. The important residue Arg397 in EBNA1 AA386-405, which engages in 2 hydrogen-bonds with Glu64 at HCDR2 (FIG. 2 H,J) is replaced with alanine in GlialCAM AA370-389 (Ala381) (FIG. 3F), which explains the decreased binding affinity between MS39p2w174 and GlialCAM peptide. Phosphorylation at position 376 likely enables binding by adding new polar interactions to the proximal LC, possibly with Arg36, a positively charged residue that is mutated from asparagine in GL (FIG. 2H).

[0159] MS anti-GlialCAM IgG titers are elevated in MS patients. To test if the observed anti-GlialCAM reactivity of MS39p2w174 is part of a broader phenomenon, we tested our remaining 147 mABs for reactivity against GlialCAM protein and the broader region AA315-395. We found 10 additional mABs that bound the ICD and 7 that bound the extracellular domain (ECD) (FIG. 3L). Two mABs, MS9p14w183 and MS21p27w115 bound unphosphorylated EBNA1 AA370-389. Interestingly, both also cross-reacted with EBNA1 as well as with the two early lytic EBV proteins BHRF1 and BLLF3 (FIG. 3L). This shows that MS39p2w174 is not an isolated phenomenon. Albeit we did not identify another mAB in our collection with the exact same characteristics, antibodies against several GlialCAM epitopes were prevalent in the majority of patients.

[0160] We proceeded with testing for cross-reactive antibodies to EBNA1 AA386-405 and GlialCAM could be detected in plasma of MS patients. we tested immunoglobulin reactivities in plasma from a cohort of 36 MS patients and 20 healthy controls. >99.9% of MS patients have been infected with EBV. As expected, all MS patients show elevated titers against EBNA1 protein, whereas 3 of 20 healthy individuals showed no IgG titer indicating previous EBV infection. Specific reactivity against EBNA1 AA386-405 was observed in 8/36 of MS patients (22.2% vs. 0% in control group, threshold set at mean+4 SD of control group) (FIG. 41). 3 of the 6 samples highest reactive to EBNA1 AA386-405 show also the highest reactivity to GlialCAM ICD (FIG. 4J). 5 of 36 MS patients show high reactivity against GlialCAM ICD (13.9% vs. 0% in control group, threshold set at mean+4 SD of control group).

[0161] 22 of the selected 148 mABs, isolated from 8 of 9 patients, showed reactivity to GlialCAM, either to the intracellular domain, or to the extracellular domain (FIG. 2J). No additional mAB was identified that bound to same phosphorylated epitope AA370-389, but two mABs bound the non-the same peptide in its non-phosphorylated form. Both mABs also showed cross-reactivity to the Gly-Ala-rich low-complexity region of EBNA1 (FIG. 2A,B,J, blue highlighted mABs).

[0162] Of note, a similar proline-rich region on myelin basic protein (MBP) has been described extensively, but we could not show any binding of MS39p2w174 to MBP protein, which does not exclude the possibility that other antibodies against EBNA1 AA386-405 might cross-react to the proline-rich region on MBP.

[0163] Immunization with EBNA1 AA386-405 generates anti-GlialCAM antibodies in mice and aggravates experimental autoimmune encephalomyelitis (EAE). To assess the effect of antibodies against EBNA1 AA386-405 in-vivo, we used the mouse model EAE. SJL mice were immunized with EBNA1 AA386-405 or scrambled control peptide (SPSRPGRSRSRGSPFPQPSP, not binding to MS39p2w174, see FIG. 2I). EAE was induced three weeks after the initial immunization with a second immunization of the same respective peptides mixed with PLP AA135-151. Mice in the EBNA1 group generated a robust antibody response to both EBNA1 AA386-405 (FIG. 4A) as well as GlialCAM protein and phospho-GlialCAM p7 (FIG. 4A-C). The EBNA1 group showed more severe symptoms of paresis, in particular during the initial peak of disease, and subsequent relapses occurred earlier and were more severe (FIG. 4D), which was most pronounced in the mice with the highest titers of anti-GlialCAM antibodies (FIG. 4F) EBNA1 promoted the infiltration of T cells and Mac3-positive myeloid cells into the CNS and enhanced demyelination (FIG. 4G,H). In addition to the B cell response, EBNA1 AA386-405 induced a strong antigen-specific T cell response, comparable to PLP AA135-151. The PLP AA135-151 specific T cell response was comparable in both groups. Fitting to the strong antibody response, EBNA1 AA386-405 specific T helper cells (Th) produced more Th1 cytokines (IFN-γ, TNF, IL-12,) and less IL-17. No robust Th cell response against GlialCAM AA369-388 pSer375 could be detected.

### REFERENCES

[0164] 1. K. Hawker, P. O'Connor, M. S. Freedman, P. A. Calabresi, J. Antel, J. Simon, S. L. Hauser, E. Waubant, T. Vollmer, H. Panitch, J. Zhang, P. Chin, C. H. Smith, O. trial group, Rituximab in patients with primary progressive multiple sclerosis: results of a randomized double-blind placebo-controlled multicenter trial. Ann. Neurol. 66, 460-471 (2009).
[0165] 2. L. Kappos, D. Li, P. A. Calabresi, P. O'Connor, A. Bar-Or, F. Barkhof, M. Yin, D. Leppert, R. Glanzman, J. Tinbergen, S. L. Hauser, Ocrelizumab in relapsing-remitting multiple sclerosis: a phase 2, randomised, placebo-controlled, multicentre trial. Lancet. 378, 1779-1787 (2011).
[0166] 3. X. Montalban, S. L. Hauser, L. Kappos, D. L. Arnold, A. Bar-Or, G. Comi, J. de Seze, G. Giovannoni, H.-P. Hartung, B. Hemmer, F. Lublin, K. W. Rammohan, K. Selmaj, A. Traboulsee, A. Sauter, D. Masterman, P. Fontoura, S. Belachew, H. Garren, N. Mairon, P. Chin, J. S. Wolinsky, O. C. Investigators, Ocrelizumab versus Placebo in Primary Progressive Multiple Sclerosis. N. Engl. J. Med. 376, 209-220 (2017).
[0167] 4. A. Negron, R. R. Robinson, O. Stuve, T. G. Forsthuber, The role of B cells in multiple sclerosis: Current and future therapies. Cell. Immunol. 339, 10-23 (2019).
[0168] 5. T. V. Lanz, A.-K. Probstel, I. Mildenberger, M. Platten, L. Schirmer, Single-Cell High-Throughput Technologies in Cerebrospinal Fluid Research and Diagnostics. Front. Immunol. 10, 1302 (2019).
[0169] 6. D. Schafflick, C. A. Xu, M. Hartlehnert, M. Cole, T. Lautwein, A. Schulte-Mecklenbeck, J. Wolbert, M. Heming, S. G. Meuth, T. Kuhlmann, C. C. Gross, H. Wiendl, N. Yosef, G. M. zu Horste, Integrated single cell analysis of blood and cerebrospinal fluid leukocytes in multiple sclerosis. 192, 2551.
[0170] 7. A. Wang, O. Rojas, D. Lee, J. L. Gommerman, Regulation of neuroinflammation by B cells and plasma cells. Immunol. Rev., 1-16 (2020).
[0171] 8. R. Hohlfeld, K. Dornmair, E. Meinl, H. Wekerle, The search for the target antigens of multiple sclerosis, part 2: CD8+ T cells, B cells, and antibodies in the focus of reverse-translational research. Lancet Neurol. (2016), doi:10.1016/S1474-4422(15)00313-0.
[0172] 9. E. L. Thacker, F. Mirzaei, A. Ascherio, Infectious mononucleosis and risk for multiple sclerosis: A meta-analysis. Ann. Neurol. 59, 499-503 (2006).
[0173] 10. A. Ascherio, K. L. Munger, Environmental risk factors for multiple sclerosis. Part I: the role of infection. Ann. Neurol. 61, 288-299 (2007).
[0174] 11. S. Abrahamyan, B. Eberspächer, M.-M. Hoshi, L. Aly, F. Luessi, S. Groppa, L. Klotz, S. G. Meuth, C. Schroeder, T. Grüter, B. Tackenberg, F. Paul, F. Then-Bergh, T. Kümpfel, F. Weber, M. Stangel, A. Bayas, B. T. Wildemann, C. Heesen, U. Zettl, C. Warnke, G. Antony, N. Hessler, H. Wiendl, S. Bittner, B. Hemmer, R. Gold, A. Salmen, K. Ruprecht, J. Neurol. Neurosurg. Psychiatry, in press (available at http://jnnp.bmj.com/lookup/doi/10.1136/jnnp-2020-322941).
[0175] 12. A. K. Hedström, J. Huang, A. Michel, J. Butt, N. Brenner, J. Hillert, T. Waterboer, I. Kockum, T. Olsson, L. Alfredsson, High Levels of Epstein-Barr Virus Nuclear Antigen-1-Specific Antibodies and Infectious Mononucleosis Act Both Independently and Synergistically to Increase Multiple Sclerosis Risk. Front. Neurol. 10, 1368 (2019).
[0176] 13. K. Ruprecht, B. Wunderlich, R. Gieß, P. Meyer, M. Loebel, K. Lenz, J. Hofmann, B. Rosche, O. Wengert, F. Paul, U. Reimer, C. Scheibenbogen, Multiple sclerosis: The elevated antibody response to Epstein-Barr virus primarily targets, but is not confined to, the glycine-alanine repeat of Epstein-Barr nuclear antigen-1. J. Neuroimmunol. 272, 56-61 (2014).
[0177] 14. N. Jafari, G. P. van Nierop, G. M. G. M. Verjans, A. D. M. E. Osterhaus, J. M. Middeldorp, R. Q. Hintzen, No evidence for intrathecal IgG synthesis to Epstein Barr virus nuclear antigen-1 in multiple sclerosis. J. Clin. Virol. 49, 26-31 (2010).
[0178] 15. J. Salzer, M. Nyström, G. Hallmans, H. Stenlund, G. Wadell, P. Sundström, Epstein-Barr virus antibodies and vitamin D in prospective multiple sclerosis biobank samples. Mult. Scler. 19, 1587-1591 (2013).
[0179] 16. K. Tengvall, J. Huang, C. Hellström, P. Kammer, M. Biström, B. Ayoglu, I. Lima Bomfim, P. Stridh, J. Butt, N. Brenner, A. Michel, K. Lundberg, L. Padyukov, I. E. Lundberg, E. Svenungsson, I. Ernberg, S. Olafsson, A. T. Dilthey, J. Hillert, L. Alfredsson, P. Sundström, P. Nilsson, T. Waterboer, T. Olsson, I. Kockum, Molecular mimicry between Anoctamin 2 and Epstein-Barr virus nuclear antigen 1 associates with multiple sclerosis risk. Proc. Natl. Acad. Sci. U.S.A. 5, 201902623-201916960 (2019).
[0180] 17. Z. Wang, P. G. Kennedy, C. Dupree, M. Wang, C. Lee, T. Pointon, T. D. Langford, M. W. Graner, X. Yu, Antibodies from Multiple Sclerosis Brain Identified Epstein-Barr Virus Nuclear Antigen 1 & 2 Epitopes which Are Recognized by Oligoclonal Bands. J. Neuroimmune Pharmacol. (2020), doi:10.1007/s11481-020-09948-1.
[0181] 18. A. Gilbert, X. E. Vidal, R. Estevez, M. Cohen-Salmon, A.-C. Boulay, Postnatal development of the astrocyte perivascular MLC1/GlialCAM complex defines a temporal window for the gliovascular unit maturation. Brain Struct. Funct. 7, 12-41 (2019).
[0182] 19. L. Favre-Kontula, A. Rolland, L. Bernasconi, M. Karmirantzou, C. Power, B. Antonsson, U. Boschert, GlialCAM, an immunoglobulin-like cell adhesion molecule is expressed in glial cells of the central nervous system. Glia. 56, 633-645 (2008).
[0183] 20. T. López-Hernandez, M. C. Ridder, M. Montolio, X. Capdevila-Nortes, E. Polder, S. Sirisi, A. Duarri, U. Schulte, B. Fakler, V. Nunes, G. C. Scheper, A. Martínez, R. Estevez, M. S. van der Knaap, Mutant GlialCAM causes megalencephalic leukoencephalopathy with subcortical cysts, benign familial macrocephaly, and macrocephaly with retardation and autism. Am. J. Hum. Genet. 88, 422-432 (2011).
[0184] 21. M. Bugiani, M. Dubey, M. Breur, N. L. Postma, M. P. Dekker, T. Ter Braak, U. Boschert, T. E. M. Abbink, H. D. Mansvelder, R. Min, J. R. T. van Weering, M. S. van der Knaap, Megalencephalic leukoencephalopathy with cysts: the Glialcam-null mouse model. Ann. Clin. Transl. Neurol. 4, 450-465 (2017).
[0185] 22. T. López-Hernández, S. Sirisi, X. Capdevila-Nortes, M. Montolio, V. Fernández-Dueñas, G. C. Scheper, M. S. van der Knaap, P. Casquero, F. Ciruela, I. Ferrer, V. Nunes, R. Estevez, Molecular mechanisms of MLC1 and GLIALCAM mutations in megalencephalic leukoencephalopathy with subcortical cysts. Hum. Mol. Genet. 20, 3266-3277 (2011).
[0186] 23. E. Jeworutzki, T. López-Hernández, X. Capdevila-Nortes, S. Sirisi, L. Bengtsson, M. Montolio, G. Zifarelli, T. Arnedo, C. S. Müller, U. Schulte, V. Nunes, A. Martínez, T. J. Jentsch, X. Gasull, M. Pusch, R. Estevez, GlialCAM, a Protein Defective in a Leukodystrophy, Serves as a CIC-2 CI-Channel Auxiliary Subunit. Neuron. 73, 951-961 (2012).

### Example 2

### Detection of EBV-Infected B Cells to Identify Autoimmune Disease Patients Likely to Respond to EBV-Infected B Cell Depleting Therapeutics, and to Monitor Response to EBV-Infected B Cell Depleting Therapeutics

[0187] Patients with MS, T1D, SS, RA, DM or another EBV-associated autoimmune disease are tested for EBV-infected by cells in their blood, spinal fluid or other biological sample. EBV-infected B cells are detected by PCR to detect EBV genes, or by immunostaining to detect B cell expression of EBV proteins, or by flow cytometry to detect B cell expression of EBV proteins and/or genes. Autoimmune patients exhibiting EBV-infected B cell are then treated with EBV-infected B cell depleting therapeutics that include monoclonal antibodies targeting one or more of the following EBV protein expressed on the surface of EBV-infected B cells: LMP1; LMP2; BILF1; LMP1+BILF1; LMP2+BILF1; LMP1+LMP2; or LMP1+LMP2+BILF1. 1-4 months following EBV-infected B cell depleting monoclonal antibody treatment, patients exhibit improvement in their corresponding autoimmune disease activity scores for MS, T1D, SS, RA, DM or other autoimmune disease. Response to EBV-infected B cell depleting therapeutic monoclonal antibodies can be monitored by post-treatment PCR, immunostaining, and/or flow cytometry; and reduction of EBV-infected B cells is associated with clinical improvement. Autoimmune patients can be monitored with EBV-infected B cell detection by PCR, immunostaining and/or flow cytometry to determine when additional treatment courses with EBV-infected B cell depleting monoclonal antibody therapy is indicated for effective disease control.

### Example 3

Depletion of EBV-Infected B cells to Treat EBV-Associated Autoimmune Disease

[0188] Patients with MS, T1D, SS, RA, DM or another EBV-associated autoimmune disease are treated with EBV-infected B cell depleting therapeutics that include monoclonal antibodies targeting one or more of the following EBV protein expressed on the surface of EBV-infected B cells: LMP1; LMP2; BILF1; LMP1+BILF1; LMP2+BILF1; LMP1+LMP2; or LMP1+LMP2+BILF1. 1-4 months following EBV-infected B cell depleting monoclonal antibody treatment, patients exhibit improvement in their corresponding autoimmune disease activity scores for MS, T1D, SS, RA, DM or other autoimmune disease.

[0189] The preceding merely illustrates the principles of the invention. It will be appreciated that those skilled in the art will be able to devise various arrangements which, although not explicitly described or shown herein, embody the principles of the invention and are included within its spirit and scope. Furthermore, all examples and conditional language recited herein are principally intended to aid the reader in understanding the principles of the invention and the concepts contributed by the inventors to furthering the art, and are to be construed as being without limitation to such specifically recited examples and conditions. Moreover, all statements herein reciting principles, aspects, and embodiments of the invention as well as specific examples thereof, are intended to encompass both structural and functional equivalents thereof. Additionally, it is intended that such equivalents include both currently known equivalents and equivalents developed in the future, i.e., any elements developed that perform the same function, regardless of structure. The scope of the present invention, therefore, is not intended to be limited to the exemplary embodiments shown and described herein. Rather, the scope and spirit of the present invention is embodied by the appended claims.

TABLE 1
Detailed descriptions and sources of peptide antigens on EBV antigen arrays

| Antigen | | Antigen | | Antigen | |
|---|---|---|---|---|---|
| Name | AA Sequence | Name | AA Sequence | Name | AA Sequence |
| EBNA1_1 | MSDEGPGTGPGNGLGEKGDT | EBNA1_81 | YFMVFLQTHIFAEVLKDAIK | LMP2_4 | GYDGGNNSQYPSASGSSGNT |
| EBNA1_2 | TGPGNGLGEKGDTSGPEGSG | EBNA1_82 | THIFAEVLKDAIKDLVMTKP | LMP2_5 | SQYPSASGSSGNTPTPPNDE |
| EBNA1_3 | GEKGDTSGPEGSGGSGPQRR | EBNA1_83 | LKDAIKDLVMTKPAPTCNIR | LMP2_6 | GSSGNTPTPPNDEERESNEE |
| EBNA1_4 | GPEGSGGSGPQRRGGDNHGR | EBNA1_84 | LVMTKPAPTCNIRVTVCSFD | LMP2_7 | TPPNDEERESNEEPPPPYED |
| EBNA1_5 | SGPQRRGGDNHGRGRGRGRG | EBNA1_85 | PTCNIRVTVCSFDDGVDLPP | LMP2_8 | RESNEEPPPPYEDPYWGNGD |
| EBNA1_6 | GDNHGRGRGRGRGRGGGRPG | EBNA1_86 | TVCSFDDGVDLPPWFPPMVE | LMP2_9 | PPPYEDPYWGNGDRHSDYQP |
| EBNA1_7 | RGRGRGRGGGRPGAPGGSGS | EBNA1_87 | GVDLPPWFPPMVEGAAAEGD | LMP2_10 | YWGNGDRHSDYQPLGTQDQS |
| EBNA1_8 | GGGRPGAPGGSGSGPRHRDG | EBNA1_88 | FPPMVEGAAAEGDDGDDGDE | LMP2_11 | HSDYQPLGTQDQSLYLGLQH |
| EBNA1_9 | PGGSGSGPRHRDGVRRPQKR | EBNA1_89 | AAAEGDDGDDGDEGGDGDEG | LMP2_12 | GTQDQSLYLGLQHDGNDGLP |
| EBNA1_10 | PRHRDGVRRPQKRPSCIGCK | EBNA1_90 | GDDGDEGGDGDEGEEGQE | LMP2_13 | YLGLQHDGNDGLPPPPYSPR |
| EBNA1_11 | RRPQKRPSCIGCKGTHGGTG | BILF1_1 | LSTMAPGSTVGTLVANMTSV | LMP2_14 | GNDGLPPPPYSPRDDSSQHI |
| EBNA1_12 | SCIGCKGTHGGTGAGAGAGG | BILF1_4 | ATEDACTKSYSAFLSGMTSL | LMP2_15 | PPYSPRDDSSQHIYEEAGRG |
| EBNA1_13 | THGGTGAGAGAGGAGAGGAG | BILF1_6 | SGMTSLLLVLLILLTLAGIL | LMP2_16 | DSSQHIYEEAGRGSMNPVCL |
| EBNA1_14 | GAGAGGAGAGGAGAGGGAGA | BILF1_7 | LVLLILLTLAGILFIIFVRK | LMP2_17 | EEAGRGSMNPVCLPVIVAPY |
| EBNA1_15 | GAGGAGAGGGAGAGGGAGGA | BILF1_8 | TLAGILFIIFVRKLVHRMDV | LMP2_18 | MNPVCLPVIVAPYLFWLAAI |
| EBNA1_16 | GGGAGAGGGAGGAGGAGGAG | BILF1_9 | IIFVRKLVHRMDVWLIALLI | LMP2_19 | VIVAPYLFWLAAIAASCFTA |
| EBNA1_17 | GGAGGAGGAGGAGAGGGAGA | BILF1_10 | VHRMDVWLIALLIELLLWVL | LMP2_23 | TGLALSLLLLAAVASSYAAA |
| EBNA1_18 | GAGGAGAGGGAGAGGGAGGA | BILF1_12 | LLLWVLGKMIQEFSSTGLCL | LMP2_24 | LLLAAVASSYAAAQRKLLTP |
| EBNA1_19 | GGGAGAGGGAGGAGGAGAGG | BILF1_13 | KMIQEFSSTGLCLLTQNMMF | LMP2_25 | SSYAAAQRKLLTPVTVLTAV |
| EBNA1_20 | GGAGGAGGAGAGGGAGAGGG | BILF1_14 | STGLCLLTQNMMFLGLMCSV | LMP2_26 | RKLLTPVTVLTAVVTFFAIC |
| EBNA1_21 | GAGAGGGAGAGGGAGGAGAG | BILF1_15 | TQNMMFLGLMCSVWTHLGMA | LMP2_28 | TFFAICLTWRIEDPPFNSLL |
| EBNA1_22 | AGAGGGAGGAGAGGGAGGAG | BILF1_16 | GLMCSVWTHLGMALEKTLAL | LMP2_29 | TWRIEDPPFNSLLFALLAAA |
| EBNA1_23 | GGAGAGGGAGGAGGAGAGGG | BILF1_17 | THLGMALEKTLALFSRTPKR | LMP2_30 | PFNSLLFALLAAAGGLQGIY |
| EBNA1_24 | GAGGAGGAGAGGGAGAGGGA | BILF1_18 | EKTLALFSRTPKRTSHRNVC | LMP2_33 | LVMLVLLILAYRRRWRRLTV |
| EBNA1_25 | AGAGGGAGAGGGAGGAGAGG | BILF1_19 | SRTPKRTSHRNVCLYLMGVF | LMP2_34 | ILAYRRRWRRLTVCGGIMFL |
| EBNA1_26 | GAGGGAGGAGAGGGAGGAGG | BILF1_23 | ILLITMGPDANLNRGPNMCR | LMP2_38 | DAVLQLSPLLGAVTVVSMTL |
| EBNA1_27 | GAGAGGGAGGAGGAGAGGGA | BILF1_24 | PDANLNRGPNMCREGPTKGM | LMP2_39 | PLLGAVTVVSMTLLLLAFVL |
| EBNA1_28 | AGGAGGAGAGGGAGAGGAGG | BILF1_25 | GPNMCREGPTKGMHTAVQGL | LMP2_40 | VVSMTLLLLAFVLWLSSPGG |
| EBNA1_29 | GAGGGAGAGGAGGAGGAGAG | BILF1_26 | GPTKGMHTAVQGLKAGCYLL | LMP2_41 | LLAFVLWLSSPGGLGTLGAA |
| EBNA1_30 | AGGAGGAGGAGAGGAGAGGG | BILF1_30 | TVIIIWKLLRTKFGRKPRLI | LMP2_42 | LSSPGGLGTLGAALLTLAAA |
| EBNA1_31 | GGAGAGGAGAGGGAGGAGGA | BILF1_31 | LLRTKFGRKPRLICNVTFTG | LMP2_44 | LTLAAALALLASLILGTLNL |
| EBNA1_32 | AGAGGGAGGAGGAGAGGAGA | BILF1_32 | RKPRLICNVTFTGLICAFSW | LMP2_46 | LGTLNLTTMFLLMLLWTLVV |
| EBNA1_33 | GGAGGAGAGGAGAGGAGAGG | BILF1_34 | ICAFSWFMLSLPLLFLGEAG | LMP2_48 | LWTLVVLLICSSCSSCPLSK |
| EBNA1_34 | AGGAGAGGAGAGGAGAGGAG | BILF1_35 | MLSLPLLFLGEAGSLGFDCT | LMP2_49 | LICSSCSSCPLSKILLARLF |
| EBNA1_35 | GAGAGGAGAGGAGGAGAGGA | BILF1_36 | FLGEAGSLGFDCTESLVARY | LMP2_50 | SCPLSKILLARLFLYALALL |
| EBNA1_36 | GAGGAGGAGAGGAGGAGAGG | BILF1_37 | LGFDCTESLVARYYPGPAAC | LMP2_51 | LLARLFLYALALLLLASALI |
| EBNA1_37 | AGAGGAGGAGAGGAGGAGAG | BILF1_41 | YAWSFSHFMDSLKNQVTVTA | LMP2_53 | LASALIAGGSILQTNFKSLS |
| EBNA1_38 | GAGAGGAGGAGAGGGAGGAG | BILF1_42 | FMDSLKNQVTVTARYFRRVP | LMP2_54 | GGSILQTNFKSLSSTEFIPN |
| EBNA1_39 | GGAGAGGGAGGAGAGGGAGG | BILF1_43 | QVTVTARYFRRVPSQST | LMP2_55 | NFKSLSSTEFIPNLFCMLLL |
| EBNA1_40 | GAGGAGAGGGAGGAGAGGAG | LMP1_1 | MEHDLERGPPGPRRPPRGPP | LMP2_58 | VAGILFILAILTEWGSGNRT |
| EBNA1_41 | GGGAGGAGAGGAGGAGAGGA | LMP1_2 | GPPGPRRPPRGPPLSSSLGL | LMP2_59 | LAILTEWGSGNRTYGPVFMC |
| EBNA1_42 | GAGGAGGAGAGGAGGAGAGG | LMP1_6 | LLFWLYIVMSDWTGGALLVL | LMP2_60 | GSGNRTYGPVFMCLGGLLTM |
| EBNA1_43 | AGAGGAGGAGAGGAGGAGAG | LMP1_7 | VMSDWTGGALLVLYSFALML | LMP2_61 | GPVFMCLGGLLTMVAGAVWL |
| EBNA1_44 | GAGAGGAGGAGAGGGAGAGG | LMP1_11 | IFRRDLLCPLGALCILLLMI | LMP2_62 | GGLLTMVAGAVWLTVMSNTL |
| EBNA1_45 | GGAGAGGGAGAGGAGAGGGG | LMP1_13 | ILLLMITLLLIALWNLHGQA | LMP2_63 | AGAVWLTVMSNTLLSAWILT |
| EBNA1_46 | GAGAGGAGAGGGGRGRGGSG | LMP1_18 | LGIWIYLLEMLWRIGATIWQ | LMP2_68 | IRCCRYCCYYCLTLESEERP |
| EBNA1_47 | GAGGGGRGRGGSGGRGRGGS | LMP1_19 | LEMLWRLGATIWQLLAFFLA | LMP2_69 | CYYCLTLESEERPPTPYRNTV |
| EBNA1_48 | GRGGSGGRGRGGSGGRGRGG | LMP1_23 | IIALYLQQNWWTLLVDLLWL | BZLF1_1 | MMDPNSTSEDVKFTPDPYQV |
| EBNA1_49 | RGRGGSGGRGRGGSGGRRGR | LMP1_25 | VDLLWLLLFLAILIWMYYHG | BZLF1_2 | SEDVKFTPDPYQVPFVQAFD |
| EBNA1_50 | GRGRGGSGGRRGRGRERARG | LMP1_26 | LFLAILIWMYYHGQRHSDEH | BZLF1_3 | PDPYQVPFVQAFDQATRVYQ |
| EBNA1_51 | GGRRGRGRERARGGSRERAR | LMP1_27 | WMYYHGQRHSDEHHHDDSLP | BZLF1_4 | FVQAFDQATRVYQDLGGPSQ |
| EBNA1_52 | RERARGGSRERARGRGRGRG | LMP1_28 | RHSDEHHHDDSLPHPQQATD | BZLF1_5 | ATRVYQDLGGPSQAPLPCVL |
| EBNA1_53 | SRERARGRGRGRGEKRPRSP | LMP1_29 | HDDSLPHPQQATDDSGHESD | BZLF1_6 | LGGPSQAPLPCVLWPVLPEP |
| EBNA1_54 | RGRGRGEKRPRSPSSQSSSS | LMP1_30 | PQQATDDSGHESDSNSNEGR | BZLF1_7 | PLPCVLWPVLPEPLPQGQLT |
| EBNA1_55 | KRPRSPSSQSSSSGSPPRRP | LMP1_31 | SGHESDSNSNEGRHHLLVSG | BZLF1_8 | PVLPEPLPQGQLTAYHVSTA |
| EBNA1_56 | SQSSSSGSPPRRPPPGRRPF | LMP1_32 | NSNEGRHHLLVSGAGDGPPL | BZLF1_9 | PQGQLTAYHVSTAPTGSWFS |
| EBNA1_57 | SPPRRPPPGRRPFFHPVGEA | LMP1_33 | HLLVSGAGDGPPLCSQNLGA | BZLF1_10 | YHVSTAPTGSWFSAPQPAPE |
| EBNA1_58 | PGRRPFFHPVGEADYFEYHQ | LMP1_34 | GDGPPLCSQNLGAPGGGPDN | BZLF1_11 | TGSWFSAPQPAPENAYQAYA |
| EBNA1_59 | HPVGEADYFEYHQEGGPDGE | LMP1_35 | SQNLGAPGGGPDNGPQDPDN | BZLF1_12 | PQPAPENAYQAYAAPQLFPV |
| EBNA1_60 | YFEYHQEGGPDGEPDVPPGA | LMP1_36 | GGGPDNGPQDPDNTDDNGPQ | BZLF1_13 | AYQAYAAPQLFPVSDITQNQ |
| EBNA1_61 | GGPDGEPDVPPGAIEQGPAD | LMP1_37 | PQDPDNTDDNGPQDPDNTDD | BZLF1_14 | PQLFPVSDITQNQQTNQAGG |
| EBNA1_62 | DVPPGAIEQGPADDPGEGPS | LMP1_38 | DDNGPQDPDNTDDNGPHDPL | BZLF1_15 | DITQNQQTNQAGGEAPQPGD |
| EBNA1_63 | EQGPADDPGEGPSTGPRGQG | LMP1_39 | PDNTDDNGPHDPLPQDPDNT | BZLF1_16 | TNQAGGEAPQPGDNSTVQTA |
| EBNA1_64 | PGEGPSTGPRGQGDGGRRKK | LMP1_40 | GPHDPLPQDPDNTDDNGPQD | BZLF1_17 | APQPGDNSTVQTAAAVVFAC |
| EBNA1_65 | GPRGQGDGGRRKKGGWFGKH | LMP1_42 | DNGPQDPDNTDDNGPHDPLP | BZLF1_18 | STVQTAAAVVFACPGANQGQ |
| EBNA1_66 | GGRRKKGGWFGKHRGQGGSN | LMP1_43 | DNTDDNGPHDPLPHSPSDSA | BZLF1_19 | AVVFACPGANQGQQLADIGV |
| EBNA1_67 | GWFGKHRGQGGSNPKFENIA | LMP1_44 | PHDPLPHSPSDSAGNDGGPP | BZLF1_20 | GANQGQQLADIGVPQPAPVA |
| EBNA1_68 | GQGGSNPKFENIAEGLRALL | LMP1_45 | SPSDSAGNDGGPPQLTEEVE | BZLF1_21 | LADIGVPQPAPVAAPARRTR |
| EBNA1_69 | KFENIAEGLRALLARSHVER | LMP1_46 | NDGGPPQLTEEVENKGGDQG | BZLF1_22 | QPAPVAAPARRTRKPQQPES |
| EBNA1_70 | GLRALLARSHVERTTDEGTW | LMP1_47 | LTEEVENKGGDQGPPLMTDG | BZLF1_23 | PARRTRKPQQPESLEECDSE |
| EBNA1_71 | RSHVERTTDEGTWVAGVFVY | LMP1_48 | KGGDQGPPLMTDGGGGHSHD | BZLF1_24 | PQQPESLEECDSELEIKRYK |
| EBNA1_72 | TDEGTWVAGVFVYGGSKTSL | LMP1_49 | PLMTDGGGGHSHDSGHGGGD | BZLF1_25 | EECDSELEIKRYKNRVASRK |
| EBNA1_73 | AGVFVYGGSKTSLYNLRRGT | LMP1_50 | GGHSHDSGHGGGDPHLPTLL | BZLF1_26 | EIKRYKNRVASRKCRAKFKQ |
| EBNA1_74 | GSKTSLYNLRRGTALAIPQC | LMP1_51 | GHGGGDPHLPTLLLGSSGSG | BZLF1_27 | RVASRKCRAKFKQLLQHYRE |
| EBNA1_75 | NLRRGTALAIPQCRLTPLSR | LMP1_52 | HLPTLLLGSSGSGGDDDDPH | BZLF1_28 | RAKFKQLLQHYREVAAAKSS |
| EBNA1_76 | LAIPQCRLTPLSRLPFGMAP | LMP1_53 | GSSGSGGDDDDPHGPVQLSY | BZLF1_29 | LQHYREVAAAKSSENDRLRL |
| EBNA1_77 | LTPLSRLPFGMAPGPGPQPG | LMP1_54 | DDDDPHGPVQLSYYD | BZLF1_30 | AAAKSSENDRLRLLLKQMCP |
| EBNA1_78 | PFGMAPGPGPQPGPLRESIV | LMP2_1 | MGSLEMVPMGAGPPSPGGDP | BZLF1_31 | NDRLRLLLKQMCPSLDVDSI |
| EBNA1_79 | PGPQPGPLRESIVCYFMVFL | LMP2_2 | PMGAGPPSPGGDPDGYDGGN | BZLF1_32 | LKQMCPSLDVDSIIPRTPDV |
| EBNA1_80 | LRESIVCYFMVFLQTHIFAE | LMP2_3 | SPGGDPDGYDGGNNSQYPSA | BZLF1_33 | LDVDSIIPRTPDVLHEDLLNF |

TABLE 2
Detailed list of protein antigens on arrays

| Antigen | Product Name | residues | source |
|---|---|---|---|
| BALF2 = EA-p138 = DBP, | EBV Early Antigen P138 | mid to | |
| Major DNA-binding protein | | C-term | |
| BALF5 | Epstein-Barr Virus BALF5 Protein (Recombinant His + SUMO) (aa1-210) | AA1-210 | E. Coli |
| BALF5 | Recombinant Epstein-Barr Virus BALF5 Protein (1-210 aa), His-SUMO-tagged | AA1-210 | E. Coli |
| BCRF1 = EBV-IL10 | BCRF1 recombinant protein :: Viral interleukin-10 homolog (BCRF1) | AA24-170 | E. Coli |
| | Recombinant Protein | | |
| BCRF1 = EBV-IL10 | Recombinant Viral EBV IL-10 Protein Summary | AA26-170 | E. Coli |
| BDLF3 | Recombinant Epstein-Barr Virus BDLF3 Protein (29-186 aa) | AA29-186 | E. Coli |
| BFRF3 = SCP = p18 | EBV Capsid Antigen P18 | full-length | E. Coli |
| BHRF1 = EA-R | Viral BHRF1 protein | AA1-142 | E. Coli |
| BHRF1 = EA-R | Recombinant Epstein-Barr virus Apoptosis regulator BHRF1(BHRF1), partial | AA1-142 | E. Coli |
| BLLF1 = gp350 = gp220 | Human BLLF1 protein | full-length | E. Coli |
| BLLF1 = gp350 = gp220 | Epstein-Barr virus (Herpesvirus 4) EBV Glycoprotein gp350/EBV GP350 | full-length | human |
| | Protein (His Tag) | | cells |
| BLLF1 = gp350 = gp220 | Recombinant gp350/220 (RBD/(a.a.4-450)) (EBV) | AA4-450 | Hek293 |
| BLLF1 = gp350 = gp220 | Recombinant gp350/220 (Ectodomain) (EBV) | AA4-863 | Hek293 |
| BLLF1 = gp350 = gp220 | Recombinant Epstein-Barr virus (Herpesvirus 4) EBV Glycoprotein gp350/EBV | AA1-490 | Hek293 |
| | GP350 Protein (His Tag) | | |
| BLLF3 | Recombinant Epstein-Barr Virus BLLF3 Protein (1-278 aa), His-SUMO-tagged | AA1-278 | E. Coli |
| BLRF2 = p23 | EBV Capsid Antigen P23 | full-length | |
| BMRF1 = EA-D = EA-p54 | EBV Early Antigen P54 | full-length | |
| BRLF1 | Epstein-Barr Virus BRLF1 Protein (Recombinant 10His, N-terminus + Myc, C-terminus) | AA352-605 | E. Coli |
| BRLF1 | Recombinant Epstein-Barr Virus BRLF1 Protein (352-605 aa) | AA352-605 | E. Coli |
| BXLF2 = gH | Recombinant gH(Ectodomain) (EBV) (Strain B95-8) | AA1-679 | Hek293 |
| BZLF1 = EB1 = ZEBRA | Recombinant Trans-activator protein BZLF1 | full-length | E. Coli |
| BZLF1 = EB1 = ZEBRA | Epstein-Barr Virus BZLF1 Protein (Recombinant His + SUMO) (Full Length) | full-length | E. Coli |
| BZLF1 = EB1 = ZEBRA | Epstein-Barr Virus BZLF1 Protein (Recombinant His + SUMO) (Full Length) | full-length | E. Coli |
| CMV Density Gradient | Cytomegalovirus Density Gradient Purified | | NHDF |
| Purified | | | |
| CMV infected Cell Extracts | Cytomegalovirus infected Cell Extracts | | NHDF |
| CMV infected Cell Extracts | Cytomegalovirus infected Cell Extracts | | NHDF |
| CMV purified antigen | hCMV purified antigen | | HFF |
| CMV Purified Glycoprotein | Cytomegalovirus Purified Glycoprotein | | NHDF |
| EBNA1 | EBV Nuclear Antigen EBNA1, P72 | AA72 | |
| | | C-term | |
| EBNA1 | EBV Nuclear Antigen-1 (EBNA-1) Recombinant Protein | full-length | Sf-9 |
| EBNA1 | EBV EBNA1 | AA408-641 | E. Coli |
| EBNA1 | EBV EBNA1, Recombinant | full-length | E. Coli |
| EBNA1 | Recombinant EBV Nuclear Antigen protein | full-length | E. Coli |
| EBNA1 (mosaic) | Recombinant Nuclear antigen-1 (EBV) | AA1-90 + | E. Coli |
| | | AA408-490 | |
| EBNA2 | Viral EBNA2 protein | 208 N-term | Yeast |
| EBNA2 | Recombinant Epstein-Barr virus Epstein-Barr nuclear antigen 2 (EBNA2), partial | AA247-454 | yeast |
| EBNA3 = EBNA-3A = BRLF3 | Recombinant Epstein-Barr virus Epstein-Barr nuclear antigen 3 (EBNA3), partial | AA138 | E. Coli |
| EBNA-3C = EBNA6 | EBNA, Native Protein | full length | native |
| EBV-EA | EBV EA, Native Protein | full-length | P3H3 |
| EBV-EA | EA Protein | full-length | E. Coli |
| EBV-EA | EBV EA protein | AA306-390 | E. Coli |
| EBV Lysate | Epstein-Barr Virus (EBV) Lysate | | Marmoset |
| | | | Leukocyte |
| EBV Density Gradient | Epstein-Barr Virus Density Gradient purified | | P3HR1 |
| purified | | | |
| EBV Infected Cell Extract | Epstein-Barr Virus Infected Cell Extract | | P3H3 |
| EBV Negative Control | Epstein-Barr Virus Negative Control Extract | | Human |
| Extract | | | B Cell |
| gH(DI-III)/gL/gp42 | Recombinant gH(DI-III)/gL/gp42 (Ectodomain)(EBV) (Strain B95-8) Complex | AA1-344 | Hek293 |
| gH/gp42 complex | Recombinant gH/gp42 (Ectodomain)(EBV)(Strain B95-8) Complex | AA1-679 | Hek293 |
| HERV-W | Recombinant Human Syncytin-1 (ERVW-1), partial | AA21-443 | E. Coli |
| HERV-W | ERVWE1 (Human) Recombinant Protein (Q01) | AA116-215 | Wheat |
| | | | Germ |
| HSV1 Infected Cell Extract | Herpes Simplex Virus Infected Cell Extract | | |
| HSV-1 (Macintyre) Density | HSV-1 (Macintyre) Density Gradient Purified | | Vero |
| Gradient Purified | | | |
| HSV2 Infected Cell Extract | Herpes Simplex Type 2 Infected Cell Extract | | Vero |
| HSV-2 (G) Density Gradient | HSV-2 (G) Density Gradient Purified | | Vero |
| Purified | | | |
| LMP1 | Recombinant Epstein-Barr virus Latent membrane protein 1(LMP1), partial | AA185-366 | Yeast |
| LMP1 | Recombinant Epstein-Barr Virus LMP1 Protein (185-386 aa) | AA185-386 | E. Coli |
| LMP1 | Recombinant Epstein-Barr virus Latent membrane protein 1(LMP1), partial | AA185-366 | Yeast |
| LMP2 | Epstein-Barr Latent membrane protein 2 Recombinant Protein Product | 1-148 | Yeast |
| LMP2 | Recombinant Epstein-Barr Virus LMP2 Protein (1-147 aa) | AA1-147 | E. Coli |
| Measles Premium Antigen | Measles Premium Antigen | | |
| NHDF Uninfected Cell Extract | NHDF Uninfected Cell Extract | | |
| NHDF uninfected cell extract | NHDF uninfected cell extract | | NHDF |
| Rubella Premium Antigen | Rubella Premium Antigen | | |
| Rubella Virus Lysate | Rubella Virus Lysate | | Vero |
| VCA, gp125 | Epstein-Barr Virus VCA Protein | full-length | human |
| VCA, gp125 | EBV VCA, Native Protein | full-length | P3H3 cells |
| Vero Uninfected Cell Extract | Vero Uninfected Cell Extract | | Vero |
| VZV Glycoprotein | VZV Purified Glycoproteins | | |
| VZV Lysate | Varicella Zoster Virus (VZV) Lysate | | Strain: |
| | | | Ellen CV-1 |
| VZV Lysate | Varicella Zoster (VZV) Lysate | | Strain: |
| | | | 275 CV-1 |
| VZV Infected Cell Extract | VZV Infected Cell Extract | | |
| VZV Infected Cell Extract | VZV Infected Cell Extract | | NHDF |

TABLE 3

| | | | | | LC | | # |
|---|---|---|---|---|---|---|---|
| barcode_id | HC CDR1 | HC CDR2 | HC CDR3 | LC CDR1 | CDR2 | LC CDR3 | clones |
| MS12_p111w108 | GGSISSGGYY | IYYSGST | CTGHTSSFDYYYGMDVW | QSVSSSY | GAS | CQQYGSSPLFTF | 1 |
| MS12_p111w13 | GFTFSSYA | ISGSGVST | CAKWLYYGSGSYYFYYYGMDV | SSDVGGYNY | EVS | CSSYAGSNNLVF | 1 |
| | | | W | | | | |
| MS12_p111w14 | GFTFSSFG | ISYDGSNK | CAKPGYSGYDFGLGYW | TANIGDNY | DSN | CVTWDSSLSAGVF | 2 |
| MS12_p111w145 | GGTFSSYT | IIPIFGTA | CAPSPAVVAGAMDNDPW | QSISNW | KAS | CQQYDSPPLTF | 3 |
| MS12_p111w15 | GGSLSGYY | ISHSGKT | CARVDYDFWSGFYDSW | SLRSYD | GKN | CASRDISGDHWVF | 1 |
| MS12_p111w153 | GYTFTDYY | ISPNNGET | CARELWSGSPDYYFDSW | SSDIGGYKY | EVT | CTSYAGSNNAVVF | 2 |
| MS12_p111w168 | GDSVSSNSAA | TYYRSKWY | CARERYRNSDVW | QSVSSN | GAS | CQQYNNWPALTF | 1 |
| | | N | | | | | |
| MS12_p111w26 | GYTFGSYD | MNPNSGNT | CARGRLDRNWFDPW | SSDVGSYNL | EVS | CCSYATSSSVVF | 1 |
| MS12_p111w35 | GYTFTSYA | INTNTGNP | CARVMGATKWNDAFDIW | SSDIGGYK* | EVT | CSSYAGSNNAVVF | 1 |
| MS12_p111w69 | GYTFTDYY | INPNSGET | CARELWSGYTDYYFDSW | SSDIGGYKY | EVT | CSSYPGSNNTVLF | 2 |
| MS12_p115w113 | GFTFSSSA | ITGSGDST | CANSDWGAYDSW | QSVSSSD | GAS | CQQYGSSTWTF | 1 |
| MS12_p115w17 | GGSLSGYY | ISHRGKT | CARVNNDFWSGFYDSW | SLRSYD | GKN | CASRDISGDHWVF | 1 |
| MS12_p115w176 | GFTFSTYE | ISSSSSTI | CGRGGYSFDYW | QGIRND | AAS | CLQHNTYPRTF | 1 |
| MS12_p115w3 | GGSLSTYY | ISHRGKT | CARVDNDFWSGFYDSW | SLRSYD | GKN | CASRDISGDHWVF | 1 |
| MS12_p115w48 | GGSLSGYY | ISHSGKT | CARVDYDFWSGFCDSW | SLRSYD | GKN | CASRDISGDHWVF | 1 |
| MS12_p115w7 | GYSISRAYY | IYHDGSP | CARRACSSISCYVDYW | SLRNYY | DKN | CHSRDSSGNHVVF | 1 |
| MS12_p115w8 | GFTFSSYG | IWYDGSNK | CVRDLRQRLVDDDFDMW | QSLVYSDGNTY | KVS | CMQGTQPWTF | 1 |
| MS20_p126w106 | GFTLRHHD | YATAADT | CVTAGVNSNYYGMDVW | QSVSNNF | DAS | CQQHSRSPRGYTF | 4 |
| MS20_p126w111 | GGSVTSVGHY | FYYSGNT | CARIIPLNYLGGPFDSW | QDIRNY | EAS | CQQFDNLPITF | 1 |
| MS20_p126w122 | GFPFSNYW | IKEDGSQK | CARVSTSKWGHFAYW | QNINTF | AAS | CQQTFTTPMSSF | 1 |
| MS20_p126w127 | GGSISSGGYY | IDYSGSN | CARGPSRGWSGRSGNNWFDPW | HDITKY | DAS | CQQYDSLPVTF | 1 |
| MS20_p126w15 | GGSISSSSYY | IYYSGNT | CARRAQYSGSSPYWYFDFW | QSVSSSY | GAS | CQQYGSSPQYTF | 1 |
| MS20_p126w158 | GFTFSAYA | ISDDGSSK | CAKDYYDSGGFYIFDSW | RSLLHKNQYHF | LAF | CMQTLQTPGTF | 1 |
| MS20_p126w162 | GGSISSSSYY | VYFSGRT | CARDHGDYTLHSFYYGMDVW | QSLLHSNGYNY | LGS | CMQALQSPPTF | 1 |
| MS20_p126w164 | GFTFTNYW | INLDGSEK | CARNRAAAGDYW | QDISNY | DAS | CQQYDNVILTF | 3 |
| MS20_p126w174 | GDSITSYY | IFYSGST | CARGTVSGYDLKVSFDYW | QSVLYSSNNKNF | WAS | CHQYHSTPLTF | 2 |
| MS20_p126w18 | GFVFPNYW | IKKDGSEK | CARDVGYCSDPSCYADWFDPW | QSVSRF | GAS | CQQYGTSPRTF | 1 |
| MS20_p126w180 | GGSISSDY | IYYSGIT | CARARQPQHLDYW | QDISNY | AAS | CQQYDNVPFTF | 3 |
| MS20_p126w94 | GGSISGYY | IFASGNT | CVRDGGDTVTRAYDFW | QSISNY | AAS | CQQSYTTPRTF | 1 |
| MS20_p128w126 | GFSLRTSGMC | IDWDEEK | CARENSAYDWGRGRVFDYW | QSIDNW | KAS | CQQYNSYSRTF | 1 |
| MS20_p128w13 | GFPFSNYW | IKEDGSQK | CARVSSSKWGHFAYW | QNINTF | AAS | CQQTFTTPMSSF | 1 |
| MS20_p128w169 | GFSLTTNGMC | INWDDEK | CARIRGPYDAFDIW | QTIYTW | KAS | CQQYNIYTWTF | 1 |
| MS20_p128w177 | GGSFSGYY | INHSGST | CARHLKDPSIAVLIENTFDIW | QSLLHSNGYNY | LGS | CMQILQTPRTF | 1 |
| MS20_p128w2 | GGSVTSVGHY | FYYSGNT | CATIIPLNYLGGPFDSW | QDIRNY | EAS | CQQFDNLPITF | 1 |
| MS20_p128w8 | GGSMVSGGYF | IDSSGST | CARRYYNFWSGYTRNWFDPW | HDISNY | DAS | CQHYENLPPSCAF | 1 |
| MS20_p129w111 | GFSLNTRSVG | IYWEDDK | CAHRRDTIIRGVADAFNFW | QSIDRY | KSS | CLEYNTYSPWAF | 1 |
| MS20_p129w135 | GFTVSSNY | IYSGGST | CARDSLAAAGFTTYYFDYW | QSVSSY | DAS | CQQRSNWPPYTF | 1 |
| MS20_p129w159 | GGSISSYY | IYYSGST | CARSSYYYYGMDVW | TGAVTSGYY | STS | CLLYYGGALVF | 1 |
| MS20_p129w25 | GFTFSSYW | INNDGSFT | CVRDFVPNSNWLDPW | SSDVGSYNY | DVS | CSSYTTSSTWVF | 1 |
| MS21_p26w101 | GGSVNNGGYY | IYFTGNT | CARGFIGYDTDGRDVAANLDS | SSDVGAYKF | DVS | CSSYSTTGLSVF | 3 |
| | | | W | | | | |
| MS21_p26w104 | GFSLSNSRMG | IFSNGEK | CARVQYNSGSYFRDYYDFW | QSISDY | AAS | CQHSYNFPPTF | 19 |
| MS21_p26w106 | GFSFSSYG | ISPSGDTT | CAKDQWELVVFDYW | QSIDTW | KAS | CQRYDSYPWTF | 29 |
| MS21_p26w107 | DGSFSGYY | ITHSGAT | CAVCVTAVHDAFDLW | QSVLYRSNNKNF | WAS | CQQYYGTPYTF | 1 |
| MS21_p26w108 | GYTFSDFH | VNPYSGDR | CARDFRAGNIKGEFDPW | GSNIGSNS | SNN | CATWDDSQGGFVF | 17 |
| MS21_p26w111 | GGSVNSGGYY | IYYSGST | CARAERTHYYESGEFRAWTTF | QGISSW | AAS | CQQANSFPYTF | 1 |
| | | | DYW | | | | |
| MS21_p26w114 | GGSISSSTYY | IYYSGST | CARTGYYDFWSGSRPFYCYMD | QSVSTW | KAS | CQQYDSYPWTF | 1 |
| | | | VW | | | | |
| MS21_p26w115 | GDSISSGDYY | IYYSGET | CARGPDFWNGDHDGYW | QSLVHSDGNTY | KIS | CMQATQFPYTF | 4 |
| MS21_p26w118 | RFSLTTTGVG | IYWNDDK | CAHLSLVLRFLEYLPLPYYDM | QSLVHSDGNTY | KIS | CMQATQFPLTF | 1 |
| | | | DVW | | | | |
| MS21_p26w119 | GESFSGYY | INHGGST | CARGGYSVGWYYFHYW | QSVSSN | GAS | CQQYNNWPTF | 1 |
| MS21_p26w126 | GGSFSGYF | MDHGGIT | CARSSYSSGWYGDFDYW | QDISTH | AAS | CQQSYGTPYTF | 4 |
| MS21_p26w127 | GYTFTTYG | ISADTGKT | CARSVLSAKDTGGLYYDYYYY | NSNIGKNF | DDD | CGTWDSRLSAPWVF | 12 |
| | | | YMDVW | | | | |
| MS21_p26w13 | GVTFRNHG | ISYDGRRK | CAGGEEKSYSHGTFDPDPPVH | SSNIGSNY | KTY | CATWDDRLRAWIF | 2 |
| | | | W | | | | |
| MS21_p26w136 | GFTFQNYG | IIWSGGRT | CARAKTPGDFFYYYMDVW | QGTSTY | GAS | CQQYYSSPFTF | 1 |
| MS21_p26w144 | GFNFGTYV | ITGSGSNT | CAKGFEGLVLAGDYYMDVW | QSVSVY | DAS | CQQRSSWPPITF | 2 |
| MS21_p26w146 | GFSFRAYA | ISYDGSNE | CATRFYFDFDYW | KLDDKY | QDD | CQAWDSSIVVF | 4 |
| MS21_p26w162 | GFKFDNYG | LDWNGGSV | CGKDIGLRWGGIDSW | SSNVGGNT | RDD | CLTWDDSLNGWLF | 7 |
| MS21_p26w167 | GFTFSTYT | ISSSSDYI | CARGPTWIPTTDSYYMDVW | ENISRY | AAS | CQQSYSTPLTF | 1 |
| MS21_p26w168 | GDSISSGDYH | ISYSGSA | CARDAGRFRRLRGFPPQDYW | EGIGNS | AAS | CQKYNSVPFTF | 3 |
| MS21_p26w169 | GGSFSVYY | INHSGFT | CAIYSSSSLASYMDVW | SGSIASNY | EDN | CQSYDSSSHVVF | 7 |
| MS21_p26w17 | GGSISSGDYY | IYTSGST | CARALSGSYYVGWFDPW | QDIRKY | DAS | CQQYDNLPLTF | 1 |
| MS21_p26w171 | GFTFSRYG | ISHDGRDK | CAKIDLATTIGGAPMDVW | NIGSKS | YDS | CQVWDSSGDHSYLVF | 17 |
| MS21_p26w176 | GFTFSSFA | ISGSGRGT | CVRYGAITRLSYLDFW | QSVLYSSNNKNY | WAS | CQQYYTTPPTF | 1 |
| MS21_p26w180 | GYTFSDYY | INPYRGGT | CARDYCSSGSCYLGWLDRW | QLGHKY | QDT | CQAWDSSTGVF | 2 |
| MS21_p27w115 | GGSFSGYL | IHHSGGA | CARLPTVLRGVPGGGRSSIDV | SLRTYY | GKN | CNSRDSRGNNVIF | 6 |
| | | | W | | | | |
| MS21_p26w21 | GFTFSNYA | ISGSGGTT | CAKWLMGAERSLTGHW | QSISSW | KAS | CQQYDSYPHTF | 1 |
| MS21_p26w22 | TFSSYG | ISHDGSEK | CAKGLVYFGWGSPQYYYYMEV | QDINNY | AAS | CQQYKTYPLTF | 3 |
| | | | W | | | | |
| MS21_p26w26 | GYSFADYG | ISAYSGNT | CARDWGDYYGSRSSHDYW | QSISTW | KAS | CQQYNSYSLPWTF | 1 |
| MS21_p26w36 | AFIFSSYP | ISHDGRKE | CVREGLNYADVW | QSISSD | GAS | CQQYNDWPPITF | 3 |
| MS21_p26w43 | GFIFSTHP | ISYDGNNK | CAREAIYYYDSSGYHTATDAF | QSIRSY | AAS | CQQSYTTPYTF | 2 |
| | | | DMW | | | | |
| MS21_p26w51 | GFTFSN*A | ISGSGGTT | CAKWLMGAERSLTGHW | SSNIGANY | SNN | CATWDDSLSGWVF | 1 |
| MS21_p26w57 | GGSISSGGYY | IYYSGST | CARLRRWLQPYSFDIW | SNDVGGYDY | DVS | CCSYADSYTLVF | 1 |
| MS21_p26w58 | GYTFTNYA | INTDNGNT | CARVGRTLGYCSGGSCETGYE | QSISSY | AAS | CQQSHSIPYTF | 5 |
| | | | HYYFMDVW | | | | |
| MS21_p26w6 | GGSIGSSNW | IYHSGST | CARAFVMVTHYYMDVW | SSNIEDNT | SND | CAAWDDTLSRYVF | 2 |
| MS21_p26w62 | GYTFSDYF | INPRTGGT | CARDRPAAGTNYYFYIDVW | QSLDSNGYNY | LGS | CMQSLRTPLVF | 2 |
| MS21_p26w7 | GFTFSSYG | ISGGSTYI | CARDRVGAAAPFDYW | QTISTS | AAY | CEQTYNMPRTF | 1 |
| MS21_p26w8 | GFAFSSYW | IKEDGSEK | CAKCSARTCYPWEECYHYYYY | QSVSSSY | GAF | CQQYVTSVSTF | 1 |
| | | | LDVW | | | | |
| MS21_p26w82 | GFIFSDYN | VSSAGNYI | CARFSPTRLLDYW | DSNIGVNY | RNN | CAAWDDSLSGFVIF | 3 |
| MS21_p26w92 | GGSINSGGHY | MYNSGNI | CARENDFWSGDYTGGFDLW | QTIRSNF | DTS | CQQYGSSPKTF | 1 |
| MS21_p26w93 | GGAFRNCG | IIPLFGMI | CAGGSSAHNSGYIYGDIGAFD | SSDVRAYDY | DVS | CCSYAGSYTLIF | 2 |
| | | | IW | | | | |
| MS21_p26w94 | GFTFVDYA | IGSKVYGG | CTRRYSGSYSRW | QGISNY | AAS | CQQYNSYPITF | 1 |
| | | TT | | | | | |
| MS21_p27w108 | GGSISTYY | IYYSGST | CARPRRPDLWSGYYDAFDIW | QSISTW | KAS | CQQYDNYWTF | 2 |
| MS21_p27w109 | GFIFSSYH | ISHDGRNE | CAREGVAYMDVW | QSVSSD | GAS | CQQYNNWPPLTF | 4 |
| MS21_p27w112 | GFSLTTSGVG | IFWDDDK | CVHEQGGWFGQSRTSRYYYYM | QDISSF | AAT | CQQSYDTPRTF | 1 |
| | | | DVW | | | | |
| MS21_p27w114 | SLTLSIDD | SPSASTT | PAIFRVLEYLGGRILDF | QSVSSSY | GAF | CHQYVTSVYTF | 1 |
| MS21_p27w118 | GYTFTGYF | INPRNGAT | CARDRPSAGTNYYFYIDVW | QNLHINGYNY | LGS | CMQALRTPLTF | 10 |
| MS21_p27w119 | GGSISDYY | IYYTGST | CARGLGIVGTTTKLEFW | QSLLHNNGYKY | LGS | CMQGLQTPWTF | 1 |
| MS21_p27w122 | GGSITSGNW | MYHSGST | CARDVHTIGSGNSRGYMDVW | QSVLYSSNNKNY | WAS | CQQYYSIPWTF | 1 |
| MS21_p27w126 | GLTVSTNY | LYSGGKT | CATEAYDTSGGREVW | GSNIGSNY | WNN | CAAWDDSLSGRVF | 1 |
| MS21_p27w129 | GGSFSGYY | IHHSGRT | CARAPRARTESIAARMGDAFD | GSDVGSYNY | DVS | CSSYTSSTTDYVF | 1 |
| | | | IW | | | | |
| MS21_p27w13 | GGSINSGGYS | IYQSGNT | CARAPSSSSWGYFDLW | QSIGSS | YAS | CQQSRSLITF | 1 |
| MS21_p27w130 | GFAFSSFA | MSGTGGSR | CARDDGQWSTTWYHW | HSISDY | AAS | CQQSDSTPWTF | 1 |
| MS21_p27w14 | GFSFTTYW | INDDGSYT | CVRESLGSGNRYFELW | QSFNNW | KAS | CQEYNSWTF | 1 |
| MS21_p27w143 | GGSISSSGYS | IYDSGST | CAKDNWDYYDSSGYYGAFDIW | QGISSY | AAS | CQQLNSYPHPF | 1 |
| MS21_p27w146 | GDSINGAGYY | ISSSGSS | CAKTYSRSWAYFDSW | QSVRAN | GAS | CQQYNHWPFFTF | 3 |
| MS21_p27w15 | GDSISGGGYS | IYNSGST | CARGGITVFGVIVPCLDPW | QSVSGS | DAS | CQHHNNWPPTFTF | 2 |
| MS21_p27w158 | RFNFNNYA | INYSDDST | CAKPTYEPSGYYGFDIW | QSISRY | GTS | CQQTYTAPLTTF | 1 |
| MS21_p27w163 | GASITSGNW | MYHSGST | CARDVHTIGSGNSRGYMDVW | SSNIGNNY | DNN | CGTWDSSLSGGVF | 1 |
| MS21_p27w167 | NYW | ISSDGNRI | CARTEERRLGEYVYYYYYYMD | GSDVGSYNY | DVS | CSSYTSSTTDYVF | 1 |
| | | | VW | | | | |
| MS21_p27w169 | GGSISSADYY | MYYSGST | CARVWSKGYYSGYFDPW | QDIRNY | DAS | CQQYGNLPLTF | 2 |
| MS21_p27w171 | TGSVSSGGHY | VYYRGSP | CARGLYYYARGKGEIWHFDLW | QSVLTRSNNKNY | WAS | CQQYYSTPITF | 20 |
| MS21_p27w172 | GGTFKKSA | IISTFGAA | CARDMSEQLIPDHYYFYYMDV | QNLRSN | GAS | CQQYNTWPRTF | 2 |
| | | | W | | | | |
| MS21_p27w174 | GFTINNYW | INSDGSTT | CVRDLYGDHPWYMDVW | QSLLYVNGYNY | LGS | CMQALQTPYTF | 4 |
| MS21_p27w176 | GYRFTNYW | TYPGNSDT | CAKFLKSEVLNARDYFDDW | QGIRSY | SAC | GQRTYNAPPSF | 1 |
| MS21_p27w178 | GFTFSDYW | IKEDGSEK | CARGQVWLPYW | QSLLHSNGNNY | MGS | CMQALQTPHTF | 4 |
| MS21_p27w18 | GDSISSGDYY | IYYSGET | CARGPDFWNGDHDGNW | QSLVHSDGNTY | KIS | CMQATQFPYTF | 3 |
| MS21_p27w2 | GGSIGSGGYY | IYYSGST | CARCPRGGSNFIATGLWFDTW | QSVLTRSNNKNY | WAS | CQQSYTPLFTF | 1 |
| MS21_p27w21 | NNY | IYADGST | CAREWKGDFSGYYSFYYYYYM | NFVITS | RDS | CQVWDSTTDHRVF | 4 |
| | | | DVW | | | | |
| MS21_p27w22 | GGSIGSGGYY | IYYSGST | CARCPRGGSNFIATGLWFDTW | QSVSSN | GAS | CHQYNNWLSLTF | 1 |
| MS21_p27w25 | GYSHTFYW | IYLDDSHT | CARAPGSLSYFDNSGHHRADS | QSVLYNSNNKNY | WAS | CQQSYTPLFTF | 3 |
| | | | FDIW | | | | |
| MS21_p27w3 | GYKFTDYH | INPYSGDR | CARDDGTLTFFDNW | SSNIGTNP | TNN | CAAWDDSLSVYVF | 1 |
| MS21_p27w35 | RYPLTELS | FDPEDGDT | CVASHLLAVGHLLPDYW | QTISKW | KAS | CQQYNTYPYSF | 4 |
| MS21_p27w39 | GDSINLYNYY | IFYSGT | CARHRGTAGYYYYSMDVW | QSLLHSNGHHY | LGS | CMQALQTITF | 1 |
| MS21_p27w51 | GFSFSSFA | ISPAGGST | CAKDLGGWELPLGNGFDVW | QGVTRW | AAS | CQQANSLPYTF | 2 |
| MS21_p27w57 | GFTFSSFA | ISYHGRNK | CAKGRGGDGTSVFYFDYW | QDITNY | DVS | CQHYANLPLTF | 1 |
| MS21_p27w58 | GGSVSSSIYY | VYHSGST | CARLTGEYDFWSGSEYYFDRW | QNILYGSNNKNH | WAS | CQQYYSGPPTF | 1 |
| MS21_p27w69 | GFIFDDYA | INWNSRTP | CVKDIGVGVGAMGVAFEHW | QSVSTY | DAS | CQQRINWPPYTF | 1 |
| MS21_p27w8 | GGSISSSSSY | IYYSGSA | CARDEGFGSGHFYTW | RILLHSDGHNY | LGS | CMQALETPLTF | 1 |
| MS21_p27w92 | GLSLSDYT | ISYDGREK | CATDRKGLFPNYYYSHHLDVW | EGISNW | DAS | CQQTHSFPTF | 1 |
| MS21_p28w101 | GFTFSSFA | ISYHGRNN | CAKGRGGDGTSVFYFDSW | QGISNL | DVS | CQHYANLPLTF | 5 |
| MS21_p28w112 | GDSIRDHY | IYYSGST | CAAYSYANWLDPW | QSVSSY | DAS | CLQRRNWPLTF | 1 |
| MS21_p28w115 | GFSVSSSY | IYSGGSI | CARGLGNDHDISGHWGWFDSW | QRISTW | DAS | CQQSNSFPLTF | 1 |
| MS21_p28w118 | GYTFTGHH | INPHSGDT | CARDVGGSDFLSGFDYW | RSNIGSNS | RNN | CATWDDGRSAFVF | 1 |
| MS21_p28w129 | GFKFDDYG | LDWNGGSV | CGKDIGLRWGGIESW | SSNVGGNT | RDD | CLTWDDSLNGWLF | 2 |
| MS21_p28w133 | DYNFADYY | IDPSDSYT | CARRWAVKNRGLMGYYYSYYM | TSNVGSHP | TND | CSTWDDSLNGPVF | 1 |
| | | | DVW | | | | |
| MS21_p28w135 | GFTFISSA | ISGSGGGK | CAKTREFSSGWPGASFDYW | QSVSSSY | GAS | CQQYGSSPLFTF | 2 |
| MS21_p28w145 | GGSINSSSDY | IYSSGTT | CAKANPDVTYSFGYMDSW | QSVTSN | GAS | CQQYNNWPPWTF | 1 |
| MS21_p28w153 | GFTFDDYA | ISWDGGTI | CAKVKTPRPNFYNYFLPETEF | QGISKW | AAS | CQQANRFPLTF | 1 |
| | | | YFDHW | | | | |
| MS21_p28w158 | EFTFDDYS | ISWNSATS | CAKGSGRNWNYGAFEYW | NIGRQS | YDS | CQVWDSSSDHAVF | 3 |
| MS21_p28w178 | GFTFSRYP | ISYDGVIK | CARDWGIAAAGPYYYMDVW | QSVSTY | DAS | CQQRDTWPPVF | 2 |
| MS21_p28w183 | GFTFDDYA | ISWDGGTI | CAKVKTPRPNYYNYFLPETEF | QGISKW | AAS | CQQANRFPLTF | 2 |
| | | | YFDHW | | | | |
| MS21_p28w2 | GGSINNYNDY | IEYRGST | CARHVPTLTDGWYLFRSGFDH | QTVLYSSNNKNY | WAS | CQQYYSTPLTF | 4 |
| | | | W | | | | |
| MS21_p28w22 | GFPFSDYG | IWFDGTKE | CARGRYVLPDAFDIW | ISNIGSNS | GNY | CSAWDDSLSAVLF | 3 |
| MS21_p28w25 | GDSISSGGYY | IYYTGRT | CARAPRGFLEEKYFDSW | QSVLYSSNDKNY | WAS | CQQYFTSPTF | 1 |
| MS21_p28w26 | AGSTSNNNW | IYHSGIT | CARAWFGEFRGAFDIW | QSVSSNY | GAS | CQQYGDLFRTF | 1 |
| MS21_p28w39 | GDSISTTRYY | IYFTGSA | CARHPLPVYYFDSW | QSISTW | KAS | CQQYIRSSWTF | 1 |
| MS21_p28w43 | GFTFSSYA | IWYDGSYK | CAKGVSSGGNTHFDSW | QSISSSY | SAS | CQQYGSSPFTF | 1 |
| MS21_p28w6 | GFSFNAYW | IKQDGSEK | CARDIETSALYKDVLTGFRYF | QSISSW | KSS | CQQYNSYSRTF | 2 |
| | | | YFYYMDVW | | | | |
| MS21_p28w69 | GFTFSTYV | ITGSGSNT | CAKGFEGLLLAGDYYMDVW | QSVSSY | DAS | CQQRSNWPPITF | 1 |
| MS21_p28w7 | DDSISSGGYY | IYYTGRT | CARAPRGFLEEKYFDSW | QSVLYSSNDKNY | WAS | CQQYFTSPTF | 2 |
| MS21_p28w81 | TFTSCG | ISTYTGDT | CARDQRHCSSSWCPFDHW | QSVSSSY | GAS | CQQYGSSKLTF | 1 |
| MS21_p29w10 | GFVFSTCG | ISIDASKT | CARDCHVIDYDFWDASFDSW | SSNIGINT | DKS | CAAWDDSLNGWVF | 1 |
| MS21_p29w109 | GFMFATYG | IWYDGSNK | CATSIPSTGITGALDLW | QSIRSNY | DIS | CQHYGRSPPITF | 7 |
| MS21_p29w13 | GFTFSSYW | IKQDGNEK | CARAVFLEWLLSSYFDYW | QGISNY | ASS | CQNYNSAPLTF | 1 |
| MS21_p29w130 | GGSFSGYY | IHHSGRT | CARAPRARTESIAARMGDAFD | QSVSSN | GAS | CQQYHNWPLTF | 1 |
| | | | IW | | | | |
| MS21_p29w158 | GFSLTNHRMG | IFSNDEK | CVRMYSKGGYPMDYW | QSMSTY | EAS | CQQSYSFPYTF | 1 |
| MS21_p29w159 | GGSISSGDFY | IYYGGTT | CARDQEAAGGTAGNYFDPW | QTIDNF | GAS | CQQSFSSPWTF | 1 |
| MS21_p29w169 | TFSTFA | IRQDGTKT | CARELPYYDSSGHWSERGGFD | TNDFGDYNY | GVT | CSSYMTGSSYVF | 2 |
| | | | LW | | | | |
| MS21_p29w17 | GYTFTGYY | IKPNSGGA | CARGDTYTPSSRYYYYYMDVW | SGSIASNY | EDN | CQSYDSSSHVVF | 1 |
| MS21_p29w183 | GYTFTGYY | IKPNSGGA | CARGDTYTPSSRYYYYYMDVW | ALPKQY | KDS | CQSADSSGAGVF | 1 |
| MS21_p29w21 | GLTVSGQY | IYTVGQT | CAGPSDRYRYYLDVW | QGITKY | AAS | CQKYDSAPLTF | 1 |
| MS21_p29w26 | GGSISSSNW | IYHSGST | CARGRGLRLEDLASFDSW | QSISSY | DAS | CQQNYRVPYTF | 2 |
| MS21_p29w35 | GFTFSTHW | IKQDGSEQ | CARAPYDFWGAYLGSYNYYMD | QSVLYSSNNKNY | WAS | CQQFYSTPYTF | 1 |
| | | | VW | | | | |
| MS21_p29w36 | GGSFSDHG | IVPIFATP | CATRVRVIGRLDASDVW | QSISTW | KAF | CQQYNSYSSTF | 2 |
| MS21_p29w5 | GFTFSDHY | IRKKVHSY | CTRTLSYEPPDHW | QGISNY | AAS | CQQYKTYPLTF | 1 |
| | | ST | | | | | |
| MS21_p29w55 | GFKFDNYG | LDWNGGGV | CGKDIGLRWGGIDSW | SSNVGGNT | RDD | CLTWDDSLNGWLF | 1 |
| MS21_p29w59 | GFGLSDYT | ISYDGREK | CATDRKGLFPNYYYSHHLDVW | EGISNW | DAS | CQQTHSFPTF | 4 |
| MS21_p29w81 | GFTFSSYW | IKQDGSEK | CARAVTIFGGVSPPDYW | QGISNY | AAS | CQKYNSAPWTF | 1 |
| MS21_p29w83 | GDSINSGGYY | IYHTGRT | CARGHYYDSTGYYLPPYYFDY | QSVSSN | DTS | CQQRSNWLTF | 2 |
| | | | W | | | | |
| MS21_p29w89 | GFAFNNYA | ITASAGGT | CAKHQYDLWSAYDYW | QSVSGSS | DAS | CQQYGSSPWTF | 3 |
| MS21_p29w92 | GDSISSGGYS | VYRSGST | CARGLIAARRLDWFDPW | QGISNY | DAS | CQQYHDLPITF | 1 |
| MS21_p30w107 | GYTFNSYN | MNPNSGNT | CARMDVRLASVLSGW | KLGDNY | QDF | CQAWDSSTAVF | 1 |
| MS21_p30w109 | GGSISSSSYY | IYYSGST | CAREDSSSWYPVFYYYYYMDV | SSNIGSNY | RNN | CAAWDDSLSGPVF | 1 |
| | | | W | | | | |
| MS21_p30w114 | GFNFNTHA | INSNGGAT | CVKSPQSGWYYFDSW | QGIGNL | GAS | CQNYRSGAFTF | 1 |
| MS21_p30w13 | SVLP | ISLDK | CARPYWRHDRVLRHHLIF*LD | QTVSSNF | DSS | CQQYGSSPITF | 1 |
| | | | RPL | | | | |
| MS21_p30w143 | GASISNGGYY | IYYSGIT | CAILSLEEGYCSSISCSSDYW | QDISNS | DTS | CQQYDNLPRYTF | 2 |
| MS21_p30w158 | GDSISSGEYY | IYYSGET | CARGPDFWSGDHDGYW | QSLLHSDGNTY | KIS | CMQATQFPYTF | 1 |
| MS21_p30w17 | FTFSSYW | IKQDGSEG | CARDDSREERKFDFWRGYRDY | QSISRW | KAS | CQQYHTYSRTF | 1 |
| | | | YYYYMDVW | | | | |
| MS21_p30w171 | GYTFISYG | ISSRTGKT | CFRHFYDDRNNLGSLDHW | ALPKKF | EDD | CFSTEDTGTDDVTWVF | 1 |
| MS21_p30w175 | GFTFSGYV | ISYDGSNK | CAKTLTRGRRFADGFDIW | SSNVVSNS | SDN | CAVWDGSLSGVLF | 1 |
| MS21_p30w18 | GGSVSSGGHY | IYITGVT | CARGEMGGSPPENW | QSVSSSF | GAS | CHQYDTSPWTF | 5 |
| MS21_p30w22 | GYRFTNYW | TYPGNSDT | CAKFLKSEVLNARDYFDDW | SGSVSTSYH | NTN | CVLYMGSGISIF | 2 |
| MS21_p30w26 | GASVSSGGYY | IYNSGTT | CARDSGWLPLGELSFSRYFDY | QNINNY | AAS | CQQSHSTPWTF | 1 |
| | | | W | | | | |
| MS21_p30w3 | SYW | IDPSDSYT | CARLQRRRFGSSSWWAGSDYY | SGHSTYA | VNSDGSH | CQTWGTGILVF | 1 |
| | | | YYIDVW | | | | |
| MS21_p30w30 | GFSFSSYG | ISPSGDTT | CAKDQWELVVFDYW | QSISNW | QAS | CQRYDSYPWTF | 1 |
| MS21_p30w36 | GFTFNDYA | IIPVLNRS | CARAVSGTYYYYYMDIW | QSISTY | AAT | CQQSYSNPQTF | 1 |
| MS21_p30w48 | GFTFSSYN | INGSGGTT | CARENYYYYYMDVW | QGINNR | DVS | CLQHKDISGFTF | 1 |
| MS21_p30w57 | GFSFNIYA | ISGSGSKA | CAKVLGYCRGDSCYLAMNLEE | QSVSTY | DAS | CQQSYRIPLTF | 2 |
| | | | IAFDIW | | | | |
| MS21_p30w62 | GFIFSNSW | IKQDGSEK | CARAYSSSGTGFDYW | QSISSW | KAS | CQQYNSYPVTF | 1 |
| MS21_p30w82 | GGSISSYH | IHMSGRT | CARESPEGQSLYYHPYYMDLW | NSNIGRNS | RDN | CGTWDDSLDGWVF | 1 |
| MS21_p31w100 | GVSIGTGTYS | IFYSESA | CARMDESAPGGLQNWFDPW | QSVLYSSNNKNY | RAS | CQQYYTTPLTF | 1 |
| MS21_p31w109 | GYTFTDYY | INPNNGGT | CAREGYCSAGSCTDVNWFDPW | SSDIGGYNY | DVN | CSSYARDKWVF | 1 |
| MS21_p31w111 | GYTFTGYF | INPRNGAT | CARDRPSAGTNSYFYIDVW | QNLHINGYNY | LGS | CMQALRTPLTF | 2 |
| MS21_p31w126 | GFTFSRFA | ISSDGGST | CVTPRSVVTGSPIDYW | ALPKKY | EDS | CYSTDSSDNFVF | 1 |
| MS21_p31w129 | GGSISSRDYY | IYHSGST | CARVTSNGVNWFDPW | QSISTY | AAS | CQQSYSIWTF | 1 |
| MS21_p31w136 | GFTFSNYG | MSYDGTKQ | CAKAGRAPPGTSTRDQKNIYY | SSNIGNNL | RND | CATWDDSLSAWVF | 1 |
| | | | HYMDVW | | | | |
| MS21_p31w143 | GHPLTDYY | INPNNGGT | CAREGYCSAGSCTDVNWFDPW | SSDVGGYNY | DVS | CCSYAGSYVVF | 1 |
| MS21_p31w144 | DDSISRGSFY | ISYSGST | CARGDRFNWNLSYYFNYW | QDISNY | DAS | CQQYDNLPLTF | 1 |
| MS21_p31w171 | GFSFRSYA | ISGSGGTS | CAKGSPHEGLLSVGELLYDFD | SSNIGDNF | DNS | CGTWDSSLSEWVF | 1 |
| | | Y | W | | | | |
| MS21_p31w172 | GFTFSSHW | INGDGSST | CARDRKLELLSYYMDVW | QTVSKS | DAS | CQQRSKWPPTF | 1 |
| MS21_p31w175 | GFTFSTYA | ISGSAGST | CAKDSGHIYYYFYYMDVW | SSNIGAGSD | VNS | CQSYDTSLSGFYVF | 1 |
| MS21_p31w2 | GGSIRPYY | ISYNGNT | CARRSLEGFCTNGVCSEDYCL | QYVSIN | GAS | CQQYNRSPQTF | 1 |
| | | | DVW | | | | |
| MS21_p31w22 | GFTFSSYG | ISYDGSNK | CAKERLRFLEWYPGRHAFDIW | QSISSY | AAS | CQQSYSTPITF | 1 |
| MS21_p31w25 | GYIFTGYH | INPKNGGT | CARDPGFSEFLSMADHW | QGIDNY | AAS | CQQLNSYPPLTF | 1 |
| MS21_p31w39 | GFTFDDYG | ISWNSGIM | CAKDGGIRFLEWSTSRPFHYM | SSNIGAGYD | GNN | CQSSDSSLSVVL | 1 |
| | | | DVW | | | | |
| MS21_p31w44 | GFTFSDFP | LSHDGTSP | CARASLTTMHYHYYLDVW | QSIGTY | ASS | CQQSFNSLWTF | 1 |
| MS21_p31w46 | GGSISSSNYY | ISYSGST | CARQISILDGSETSYVHPYYY | TSNIGSNP | NNN | CAAWDDRLTGSWVF | 1 |
| | | | YYMDVW | | | | |
| MS21_p31w58 | GYTFSNFG | VNPYTGNT | CAREKVALAASTTVPDAFHIW | QSISHW | KAS | CQQYHIFSPTF | 1 |
| MS21_p31w59 | GFTVSNNA | FTDTGGST | CAKTRVDYDILTGYYRYFDHW | QSISRW | KAS | CQQYKSYSYSF | 1 |
| MS21_p31w62 | GFTFTTYP | ISYDGNEQ | CARVLSSAWPLSSPDYW | QSVSTY | DAS | CQQRSSWPPALSF | 1 |
| MS21_p32w10 | GGSISSGNYY | IYDTGST | CARAGGVNWFDPW | QSIINY | TAS | CQQSYGSPWTF | 1 |
| MS21_p32w101 | GFFFKNYW | IKLDGSEK | CAREVGVTGTTPLDYW | NIGSKS | YNN | CQVWDDVSGRVF | 2 |
| MS21_p32w107 | GGSITSGDYY | TFDSQRT | CARGPGGDFDYW | SGINVDTYR | YKSDSDN | CMIWHGSAWVF | 1 |
| MS21_p32w158 | GDSVSSGSYY | VSYSGST | CARLRDYYDSRNYYYPKTAFD | QGIRNY | GAS | CQQSYSTPRTF | 2 |
| | | | YW | | | | |
| MS21_p32w159 | GVSLRKSRMG | IFSNGKK | CARVQYNSRSYFRDYYDFW | QSISDY | AAS | CQHSYNFPPTF | 1 |
| MS21_p32w162 | GDSVTSTDYY | IYYSGSP | CARGFNYDDYQSKW | QSINNW | KAS | CQQYNTYSRTF | 1 |
| MS21_p32w177 | GFSFSTYS | IGKNGNYI | CVRCHGVMATICYFDRW | QSISSW | KAS | CQQYTGTSRTF | 1 |
| MS21_p32w18 | GGSFSGYL | IHHSGGA | CARLITILRGVPGGGRSSIDV | SLRSYY | GKS | CNSRDSRGNSVIF | 1 |
| | | | W | | | | |
| MS21_p32w2 | GFTFNRYA | LSGRTGST | CARERDSSSSFDYW | QDISNF | DAS | CHQYENLPYTF | 1 |
| MS21_p32w20 | GFSLSTSGMC | IDWDDDK | CARIAPGTNCYTDYFDYW | QSISSYY | GTS | CQQYGSSRTF | 1 |
| MS21_p32w26 | GGSFSGYY | INHSGST | CARGSYSWYYYW | QSVSSY | DAS | CQQRSNWPTF | 1 |
| MS21_p32w37 | GGSINTGDYY | TFYSGST | CARVGARVVLTTTRGGFDIW | SIDIVSHNY | EVT | CSSYGGGNNLEVF | 1 |
| MS21_p32w39 | GDSINGAGYY | ISSSGSS | CAKTYSRSWAYFDSW | QSVRAN | GAS | CQQRSNWLTF | 1 |
| MS21_p32w43 | GFIFSDYT | ISYDGREK | CATDRKGLFPNYYYSHHLDVW | EGISNW | DAS | CQQTHSFPTF | 1 |
| MS21_p32w5 | GFTVLSSY | LYSGGST | CARDLGSGFDPFKYW | QSFSTW | KAS | CQQYNSYPYTF | 1 |
| MS21_p32w55 | GDSVSSNSAS | TYYRSKWYN | CAREERGVTIFGVIITRLYYM | ALPKQY | KDT | CQSADSSGTYVF | 1 |
| | | | DVW | | | | |
| MS21_p32w93 | GGSISSNNYF | VFYNGGA | CARHIRFADTSSWNYFDYC | QGISSY | AAS | CQQLNSYVFTF | 1 |
| MS21_p33w107 | GFSLSNSRMG | IFSNGEK | CARVQYNSGSYFRDYYDFW | QSISDY | AAS | CQHSHNFPPTF | 1 |
| MS21_p33w111 | GFSFRGYV | ISYDGSNK | CARAKNRWELLRW | QSVSSN | GAS | CQQYDNWPPITF | 1 |
| MS21_p33w112 | SFSSFA | ISFDGSSK | CAKDRFLWGGNDITSWPIDYW | QDISNY | DAS | CQQYDYLPLTF | 1 |
| MS21_p33w133 | GGSVNSRTYY | MFYTGSP | CARYAPYDHAWETYEAFDIW | QSLLQSNGYNY | LGF | CMQALQTPYTF | 1 |
| MS21_p33w135 | GDSISSNHYY | VFYSGST | CVREVGARNWYFSPRKIDPW | QDISDY | DAS | CQQYDNFPPTF | 1 |
| MS21_p33w14 | GFSLDNPRMG | LFSNDEK | CARFNGLDTPIIGYWYFDLW | QDIDTW | AAS | CLQAVSFPYTF | 1 |
| MS21_p33w146 | GGSISNFY | VFDSGNS | CARVSWRPRKFPGIAVAGFDY | QSLLESNGYNY | LGS | CMQTLQIPWTF | 1 |
| | | | W | | | | |
| MS21_p33w159 | NYG | ISPYNDDT | CARAHRNFYYESRGSAYYFYY | KLGDKY | QDN | CQAWDSSTGVVF | 1 |
| | | | MDVW | | | | |
| MS21_p33w162 | GLSLSTGGMC | IDWDDDK | CARGTLAYCGGDCYSLRPWYF | QTITTY | AAS | CQQSFSTLYTF | 1 |
| | | | DLW | | | | |
| MS21_p33w175 | GFTFSRYG | ISHDGRDK | CAKIDLATTIGGAPMDVW | NIGSKS | YDN | CQVWDSSGDHSYLVF | 1 |
| MS21_p33w183 | GGSVSSSIYY | VYHSGST | CARLTGEYDFWSGSEYYFDRW | QNILYGSNNKNY | WAS | CQQYYSGPPTF | 1 |
| MS21_p33w20 | GGPISSSNW | IYHSGST | CARGRGLRLEDLASFDSW | NIGSKN | RDT | CQVWDSSTVIF | 1 |
| MS21_p33w37 | GGSISSSTYY | GYYSGSN | CARHPYDGSGFYVDQW | SSNIGSNF | RND | CAAWDDSLNVVVF | 1 |
| MS21_p33w69 | GYRFTSHW | IYPADSDV | CARLPGWGGWSPRADFW | QGIGNY | GAS | CQQLNTYTLTF | 1 |
| MS21_p33w93 | GFTFSSFA | ISYHGRNT | CAKGRGGDGTSVFYFDYW | QGIGNL | DVS | CQHYANLPLTF | 1 |
| MS28_p10w109 | GDSMSGYH | IYYSGGT | CARLRRGYSRPKYYYYGMDVW | QSLLHSFGDNY | LGS | CMQALQTPPYTF | 14 |
| MS28_p10w111 | GFSLSTPEMR | IDWDDDT | CARMVRGVAARPRTYYFDYW | NIGSKS | DDS | CQVWDISSDPLGIF | 13 |
| MS28_p10w135 | GGSFTDYT | IRHGGST | CARRASFRTGFYENYSFYYYL | ETIDNY | AAS | CQQSYSLPYTF | 3 |
| | | | DVW | | | | |
| MS28_p10w136 | GYSITGSYY | VYHSGST | CARDLFQGYFGATYQEIDYW | TSNIETNY | RDN | CAAWDDSLSGRVF | 14 |
| MS28_p10w164 | GFSLSNARLG | IFSDDEE | CARTVVRLPDYW | QSILYSSNNKNF | WAS | CHQYYSSPQSF | 1 |
| MS28_p10w17 | GDSVSSTDHS | VNYNGFT | CARGTSGEQFGDYW | EDVITE | GAS | CLQDINNPWTF | 2 |
| MS28_p10w2 | GYTFTSYH | INPSGGST | CARDPLFWSDDYSLGYYYYMD | SSNIGNNY | DNN | CGTWDSSLSDVVF | 1 |
| | | | VW | | | | |
| MS28_p10w44 | GGSIDISGYY | VHHSGSA | CARAHRRTAQIFDSW | ISNIGAGYD | GDN | CQSYDTSLSGPDVVF | 7 |
| MS28_p10w69 | GYIFGTYW | IYPGDSET | CARTDCSRTSCSSLDPW | QSISNW | KAS | CQQYNSFPLTF | 2 |
| MS28_p1w10 | GYTFTSYH | INPSGGST | CARDPLFWSDDYSLGYYYYMD | SSNIGNNY | DNN | CGTWDSSLSDVIF | 1 |
| | | | VW | | | | |
| MS28_p1w14 | GGSVSAYY | ITHSGSP | CARVLINYYYMDVW | QSVSSSY | GVS | CQQYGSSPMYTF | 5 |
| MS28_p1w17 | GSSISNYY | ISDSGTT | CARDRGGISSTWYRNYYYYGL | QSIGNW | QAS | CQQYNNYSPLTF | 1 |
| | | | DVW | | | | |
| MS28_p1w20 | GDSITTYY | TYNSGST | CARDKEHTYGRTFDYW | NSDVGAYNY | DVN | CCSYAGGDVVF | 1 |
| MS28_p1w35 | GGTFSSYA | IIPIFGTA | CARGTIFGVVIRGSGWFDPW | QSLLHGFGANY | LGS | CMQALQTPPYTF | 1 |
| MS28_p1w43 | GDSVNSRRYY | VYSSGST | CARDVGVKGHDFWSGQDHWFF | QSINSW | KAS | CQQYDSYPWTF | 1 |
| | | | DLW | | | | |
| MS28_p1w55 | GFTFISVW | TNTDGSIT | CVRDREALDWFDFW | PASLSSSP | null | CAAWDDSLNGYVF | 1 |
| MS28_p1w57 | GGTFSRYT | IIPIFGTA | CGRVSSDRESQRFGGLFDYW | QSVSSTY | GAS | CQQYGSSSYTF | 1 |
| MS28_p1w8 | RFTFSNYA | ISYDESNE | CARSKGTSSGYDFIFDIW | QTILYSSNNKNY | WAS | CQQYYSTPLTF | 2 |
| MS28_p1w92 | GGSVSAYS | ITHSGSP | CARVLINYYYMDVW | QSVSSSY | GVS | CQQYGSSPMYTF | 1 |
| MS28_p5w109 | GGSFTDYT | IRHGGST | CARRASFRTGFYENYSFYYYL | ETIDNY | AAS | CQQSYSLPHTF | 1 |
| | | | DVW | | | | |
| MS28_p5w114 | GYSFTSYW | IDPSDSYT | CARLGVATILDPWALWGHWYF | QTISTY | AAS | WQQSYITPRTF | 1 |
| | | | DLW | | | | |
| MS28_p5w129 | GFSFDDYT | ITWDGGIT | CTKGGPSTVMFASWHSDLW | YFGTKS | DDS | CQVWDSSSDHVVF | 1 |
| MS28_p5w13 | GFTFTTYW | IKQDGSEK | CARTWIQLWPFDYW | QSVLYSSNNKNY | WAS | CQQYYSTPFTF | 1 |
| MS28_p5w163 | GFIFSSSV | IRGNGDYT | CAKSLPTSRYYFDYW | TSDVGGYDY | DIS | CSSYSGSSTDVVF | 1 |
| MS28_p5w171 | GFTFSSYA | ISGSGYST | CAKSYSTVVTPNDYW | SSDVGNYNL | EVN | CCSFTSSATWVF | 1 |
| MS28_p5w178 | GCDVSAYG | ISPGDSTT | CAKIRQEIISPGLPQPPGLRA | QSVLYSSNNKNY | WAS | CQQHYGNPRTF | 1 |
| | | | FDVW | | | | |
| MS28_p5w193 | GDSMSGYH | IYYSGGT | CARLRRGYSRTKYYYYGMDVW | QSLLHSFGDNY | LGS | CMQALQTPPYTF | 1 |
| MS28_p5w51 | GFSLSTPELR | IDWDDDT | CARMVRGVAARPRTYYFDYW | QGISSY | AAS | CQQYYSYPRTF | 1 |
| MS30_p104w10 | GFSLRSSGVG | IYWDDDR | CARTWLWKDYFDYW | QSISRY | GAN | CQQCRDSVLTF | 2 |
| MS30_p104w112 | GYNFAEFW | IYPGDSET | CARRGGWGRGSYYFDYW | QSVSSNY | GAS | CQQYGSSFTF | 5 |
| MS30_p104w114 | GGSISSSGYS | IHYTGNT | CARGDGWMQLADW | TSNIGDNF | DSN | CGAWDGSLSAGVF | 20 |
| MS30_p104w145 | SGSA | IRSKANSY | CTRHVEMATIYSGNDYW | QSLVYSDGNTY | KVS | CMQGTHWPFTF | 1 |
| | | AT | | | | | |
| MS30_p104w163 | GYTFNNSA | ISVANGNT | CARGQDSDYPYTVFYSNDPEF | ILANKY | KDS | CYSGAGNTRMF | 3 |
| | | | W | | | | |
| MS30_p104w176 | GYTFSTYG | ISGYNGRR | CARAGETDYEFWSGYRYGFDV | SSDVGGHDF | EVT | CSSYAGSNTVVF | 1 |
| | | | W | | | | |
| MS30_p104w20 | GFSLRSSGVG | IYWDDDR | CARTWVWKDYFDYW | QSISRY | GAN | CQQCRDSVLTF | 1 |
| MS30_p104w21 | GFTFSSYW | INHDGSST | CVRDRGYDSSGLWNKMFDYW | SSDIGAGYD | SNT | CQSQDSTLSDVGVVF | 1 |
| MS30_p104w30 | GFTFNTYA | VSFDGTKK | CARDRRSFGGADVLPRDAFDV | RSVFYSSNNKNY | WAS | CQQYYTTYSF | 4 |
| | | | W | | | | |
| MS30_p104w35 | GHTFTNHA | INAGKGNR | CARDTGGWKERDSFDIW | ERINTNT | GAS | CQQYGSSFIF | 1 |
| MS30_p61w115 | GFPFSNFA | IRGSGSNT | CAKTNFGDYYHYGMDVW | QGISNY | AAS | CQQFYSYPLFTF | 1 |
| MS30_p61w118 | GYNFAKYW | IFPDDSDT | CARRPSPSYHYVSGGYSGDVF | HSISSY | DAS | CQHRSNWPPMWTF | 7 |
| | | | DIW | | | | |
| MS30_p61w122 | GFTFRIFA | VSGSGDDT | CAKDQWLGRFDLW | SSDVGGYNY | DVT | CCSYGDTYARNVF | 4 |
| MS30_p61w129 | GFSLTSSGVG | IYWDDDR | CARTWLWKDYFDYW | QSISRY | GAN | CQQCRDSVLTF | 2 |
| MS30_p61w135 | GFKCRDYG | ISYEGRTE | CARDVLGILTGQFDPW | QSVVHSDGNTY | KVS | CTQATQFPFTF | 1 |
| MS30_p61w145 | GASVSSNTVG | TYYRSKWH | CARTQWVGSSLLFDYW | QSISNW | KAS | CQQYDSPPLTF | 1 |
| | | N | | | | | |
| MS30_p61w167 | GYTFTSFD | MNPNSGNI | CARVRGGRYFDYW | QSLLHSHGYNY | LGS | CMQALQTPWTF | 1 |
| MS30_p61w174 | GFTFSRYW | IDQDGSEK | CARTGYSSNSLDYW | SSNIGYNS | DNN | CGTWDSSLSVGVF | 1 |
| MS30_p61w175 | GDSISSGGYY | IYSSGGT | CARGSSSAYLRHGRLGPMDVW | SGSVSTTHY | NTD | CVLYMGSGILVF | 1 |
| MS30_p61w176 | GGSVSSSSHY | MYYKGTT | CARLRIASLPGVAYYGMDVW | SSNIGAAYP | ANN | CQSFDSSLSAEVF | 1 |
| MS30_p61w178 | GFSLSSPTMG | SYSNDEK | CARTEASYGWGSFDSW | RNDVCGYNY | EVS | CGSYADFKNVVF | 1 |
| MS30_p61w180 | GFIFSSYA | ISYDGSSK | CASVWELLSVTGTPDYW | SSDVGGYNY | YVT | FSSYTTSSTLVF | 1 |
| MS30_p61w20 | GGSFNGYS | INHSGDT | CATSMTSFYGFDVW | QSILSSSYNKNY | WAS | CQQYYSNPLTF | 1 |
| MS30_p61w25 | NYG | ISGYNGRR | CARVGETDYEFWSGYRYGFDV | SSDVGGHDF | EVT | CSSYAGSNTVVF | 3 |
| | | | W | | | | |
| MS30_p61w48 | GGSFSGYY | IDHSGTS | CAKQGGNSLIQGGYYFDSW | QSISSW | DAS | CQQYNNYPWTF | 1 |
| MS30_p61w89 | DVSVSSGAYY | VDYRGST | CARYDPPYSFDDW | QGISSY | AAS | CQQLNSYPYTF | 1 |
| MS30_p67w109 | GGSFSGYY | INHSGNT | CATTDDFWSGYFEGLHW | QSLLHSNGYTY | LGS | CMQALQTPLTF | 1 |
| MS30_p67w115 | RFSLSTTGVN | IYWDGDK | CAHSGGYGSGLTW | SSDVGGYDY | DVN | CSSYTSNSTYVF | 1 |
| MS30_p67w123 | GGSISSDDYY | IYYSGST | CARSRNHHSYDGINDYYYYGM | ESVSTSY | DAS | CQQRSSWPPPF | 1 |
| | | | DVW | | | | |
| MS30_p67w127 | GDSVRNNNLY | VYGTGNT | CVGAPAKPNVDWLSPFDYW | HSLGSV | LAS | CQQHNSWPLTF | 1 |
| MS30_p67w129 | GFAFGSYS | ISSHGTDE | CARDSVPYVGVVTRGVYFDIW | QSVATY | DAS | CQQRSSWPPPF | 3 |
| MS30_p67w130 | GFTFSSYG | IWFDGSNK | CARIRDIGGIDYW | GGSLASNY | ENT | CQSYDTGNPWVF | 1 |
| MS30_p67w143 | SFSTYG | ISYDGGKT | CARDSVPYVGIVTRGIYLDSW | QSVSTY | DAS | CQQRSNWPPPF | 1 |
| MS30_p67w145 | GFSLSTTGVN | IYWDGDK | CAHSGGYGSGLTW | QRISRY | AAS | CQQSYGHPPTF | 4 |
| MS30_p67w163 | GITFNPYA | ISASGGST | CVRGRLGYCSGASCEKNWFDP | SNNVGSYA | RDS | CSTWDYSLSALSS | 1 |
| | | | W | | | | |
| MS30_p67w167 | GYTFTTYY | INPSGGRT | CARGRTAFYMDVW | QSVATY | DAS | CQQRSSWPPPF | 1 |
| MS30_p67w169 | GFTFSTYA | IVGSANT | CAKGWATFRVDITNDAFDVW | QSLLHSDGRTY | AVS | CMHTIQLPYTF | 1 |
| MS30_p67w20 | GITVRSYA | ISASGGST | CVRRRLGYCSGASCEKNWFDP | SGSVSTSYY | STN | CVLYMGSGISVF | 1 |
| | | | W | | | | |
| MS30_p67w39 | GYTFTDYL | IHPENGNT | CARALSPSGSGWNLAHW | LGISNY | AAS | CQKYNSFPLTF | 1 |
| MS30_p67w48 | GCTFRSSA | ISYDGSTQ | CARASSTGGDHIAAVRLGDYW | QSVSSN | GAS | CQQYNDWPRTF | 1 |
| MS30_p67w51 | GFTFSSYG | ISFDGSNK | CAKDHLPHYYISSGYFDHW | QDIRGW | AAS | CQQGNSFPRTF | 4 |
| MS30_p67w8 | GFTFSNYW | IKVDGSEE | CARVRGWYDYFDCW | QSLLHSNGHHY | LAS | CMQALQTRTF | 1 |
| MS30_p67w89 | GITFNTYA | ISASGGST | CVRGRLGYCSGASCEKNWFDP | SGSVSTSYY | STN | CVLYMGSGISVF | 1 |
| | | | W | | | | |
| MS30_p67w92 | GYRFTNYD | MSPDSGNT | CARGGDWFDLW | RSDVGGYNY | EVT | CSSYAGTNIHVLF | 1 |
| MS30_p67w93 | GFTFSNYA | IVGSANT | CAKGWATFRVDITNDAFDVW | QSISNY | AAS | CQQSYITPVTF | 2 |
| MS30_p70w115 | GGSISSDY | IYNSGTT | CARGGPHYGDYGALWDYW | QSIKSY | AAS | CQQSYNTPWTF | 1 |
| MS30_p70w127 | GGTFSDYG | IIPMFHTL | CARAPLRSRSNWELLLKRVDF | QSISSNF | DAS | CQHYGSSPPFTF | 2 |
| | | | LYLDVW | | | | |
| MS30_p70w130 | GGSFSGDY | INRSGST | CARGLAAMAPYGLDVW | QVINSY | AAS | CQQLNSYPFTF | 1 |
| MS30_p70w136 | GYSFTGYY | INPNSGGT | CARDLAPAAISGYYHYGMDVW | SSDVGGYNY | YVT | CSSYTTSSTLVF | 2 |
| MS30_p70w171 | GVSISSNKY | IYHSGSL | CASYCTGLSCYIDSW | ALPKQY | KDS | CQSADSSGSYVVF | 1 |
| MS30_p70w175 | GDSISSGGYY | IYSSGST | CARGSSSAYLRHGRLGPMDVW | QSVLNRSNNKNY | WAS | CQQYYSPPLTF | 2 |
| MS30_p70w177 | GFTFRSYA | VSDDGSII | CARATTRNGSSFPHFDYW | QSIKSY | AAS | CQQSYNTPWTF | 1 |
| MS30_p70w21 | GVSISSNKY | IYHSGSL | CASYCTGLSCYIDSW | QDISHY | AAS | CQQYHTYPLTF | 1 |
| MS30_p70w48 | GGSISSGAYY | IYYTGST | CARAPISARYFDLW | QSISSW | DAS | CQQFYSYPLFTF | 1 |
| MS30_p70w69 | GFTVSSNY | IYSGGST | CARARDYYHSSGYDYW | SFNIGNNY | DNN | CGTWDSSLSAWVF | 1 |
| MS30_p70w81 | GFTLRRYG | ISHDGTTT | CAKDLYGYDSSGVYISIDLW | SSDVGGFNY | DVG | CSSYTTSSAVLF | 1 |
| MS30_p73w10 | GFTFSSHD | ISGSGGTI | CAKRRVGTYPAHDYW | QSVTSHY | GAS | CQQCGSSFCTF | 1 |
| MS30_p73w108 | GLIVSNNY | ISAGGDT | CARGWFQLPRDWFDPW | QSVSNY | DAS | CQQRSNWPLTF | 2 |
| MS30_p73w111 | VESFSDYY | INGRGDS | CARGLNWNFFSWYFDLW | QSISSF | SAS | CQQSYITPVTF | 2 |
| MS30_p73w126 | GYNFAKYW | IFPDDSDT | CARRPSPSYHYGSGGYSGDVF | HSISSY | DAS | CQHRSNWPPMWTF | 5 |
| | | | DIW | | | | |
| MS30_p73w136 | GYIFTNYW | IDPSDSYA | CARRGQGVLSSSDIW | QGTRNY | GVF | CQQYNIHPWTF | 2 |
| MS30_p73w15 | GGTFNSFS | IVPMIDKT | CARLTVVVTAMSHYYINGMDV | QSISSSF | ATS | CQQYFGLPPITF | 2 |
| | | | W | | | | |
| MS30_p73w158 | GGSISSDDYY | IYYSGST | CARSRNHHSYDGINDYYYYGM | ESVSTSY | GAS | CQQYGRSPITF | 3 |
| | | | DVW | | | | |
| MS30_p73w174 | GFTFSGSW | IKPDGSAR | CARGYLW | QSISSW | DAS | CQQYNYYF | 2 |
| MS30_p73w22 | GDSISSAGYY | ISYGGSA | CARDNDYGDLLDYW | QSISRY | TAS | CQQSYSSPRSF | 1 |
| MS30_p73w30 | YTFSSYG | ISGYNGRR | CARAGETDYEFWSGYRYGFDV | SSDVGGHDF | EVT | CSSYAGSNTVVF | 1 |
| | | | W | | | | |
| MS30_p73w51 | GYIFTNYW | IDPSDSYA | CARRGQDLLSSSDIW | QGTRNY | GVF | CQQYNIHPWTF | 2 |
| MS30_p73w57 | GGSISSSNW | IYDSGST | CARLYGLGSSDDLW | ALPKQY | KDS | CQSADSSGTYWVF | 1 |
| MS30_p73w62 | GGALSTYA | IIPILVTP | CARGSTDTNTGFFDYW | QSVHSNY | DAS | CQQYGDSISF | 1 |
| MS30_p73w82 | GYTFSSYG | ISGYNDRR | CARAGETDYEFWSGYRYGFDV | SSDVGGHDF | EVT | CSSYAGSNTVVF | 1 |
| | | | W | | | | |
| MS30_p75w111 | GVSITSANW | IYRSGST | CVRDLHTIFESEDQW | QSVFYSPNNQNY | WAS | CQQYYTTPLTF | 1 |
| MS30_p75w113 | GFTFSSYA | IDGSGGST | CAKRYGDGAFDIW | QSISSW | DAS | CQQYNSYPITF | 1 |
| MS30_p75w158 | GFTFSNAW | IKSKSAGG | CTTDQGIADRPSIGYW | QSVSSN | GAS | CQQYNNWPLTF | 1 |
| | | TT | | | | | |
| MS30_p75w163 | | ISASGGST | CVRGRLGYCSGASCEKNWFDP | SGSVSTSYY | STN | CVLYMGSGISVF | 1 |
| | | | W | | | | |
| MS30_p75w171 | FSLSDFGEG | IYWDDDK | CAHRMRSGIRFFDYW | QGISYY | DAS | CQQRSEWPPLTF | 1 |
| MS30_p75w183 | YNFTTYW | VDPSDSYT | CARRRLSGYSLDAFSLW | QKVGSN | DAV | CQQYSGWPPEGTF | 1 |
| MS30_p75w25 | VLTFPTFG | VSVSGDST | CAKRYYYESSGYYYEPGDAFD | QSVSSN | GAS | CQQYNNWPRTF | 1 |
| | | | IW | | | | |
| MS30_p75w35 | GGSFSGYY | INHSGST | CARGRGLLEWLFHYYFDYW | QSISYY | AAP | CQQSYNTPRTF | 1 |
| MS30_p75w59 | GFTFSSHT | ITSSGAYK | CARDALTTIFGVTANTYAMDV | NSNVAGIY | RTN | CAAWDDNLSGQVF | 2 |
| | | | W | | | | |
| MS30_p75w89 | GFSLNNARMG | IFSKDEK | CAREMSATGGYWFFDIW | QSISTY | AAS | CQQCYSSPRSF | 1 |
| MS30_p80w107 | GGSVTSGGYF | IYDSGST | CARAGFKGEYPEFIQLW | SSNVGSHT | NNN | CGAWDDSLNGPVF | 1 |
| MS30_p80w174 | GFTFSSYW | INSDGSST | CARVLPSGSLAADYW | SSDVGSYNF | EVS | CCSYVGSSLYVF | 1 |
| MS30_p80w18 | NGSIISTVYH | IYFTGNS | CARQAQETSGWTRDWYFDLW | ALPKKY | EDS | CYSTDSSSNQRVF | 1 |
| MS30_p80w180 | GFALSSSA | IVVGSSNT | CAAEEYQRAHAGYW | QSLVHSDGNTY | RIS | CMQATQLRTF | 1 |
| MS30_p80w2 | GVSVNSADSN | IHYSGNV | CARGRGEYEGFDVW | QSVLYSPNNRNH | WAS | CQQYYSSPFTF | 1 |
| MS30_p80w20 | GYTLTELS | FDPKDRET | CAAEYLAPRTGTFDYW | QAISRA | DAS | CQHFDSYAQTF | 1 |
| MS30_p80w48 | YGSIRSHSYF | IYVTETT | CARHRGNGPAGITTGMDVW | RSNIGTNT | SDD | CAAWDDNLNGLWAF | 1 |
| MS30_p80w62 | GYTFTSYG | ISAYNGNT | CARDSAFSSGSLFNGVFDIW | QSVSSSY | GTS | CQQYGSSPWTF | 1 |
| MS30_p87w100 | GYSFTTYA | INTGSANT | CAREKATRRGNYVYYYGMDVW | QDISNY | DAA | CQQYDTLPYSF | 1 |
| MS30_p87w113 | GFTFSSYA | ISFDGSNK | CARGEVVVTAALFEHW | RSNIGRTY | SNN | CAAWEDTLSAHVVL | 1 |
| MS30_p87w118 | GYNFAKYW | LFPDDSDT | CARRPSPSYHYVSGGYSGDVF | HSISSY | DAS | CQHRSNWPPMWTF | 1 |
| | | | *YL | | | | |
| MS30_p87w130 | GFSLNNARVG | IFSNDVK | CARMHEYCSTTTCYTDFYYGM | QSLVHSDGNTY | MVS | CMQGTHWPVTF | 1 |
| | | | DVW | | | | |
| MS30_p87w153 | GFTFGTYT | ISYDGSNT | CARDSVPYVGVVTRGVYIDYW | QSVDSY | DAS | CQQRSNWPPPF | 1 |
| MS30_p87w158 | GFSFNSYG | ISKDGGTK | CAKDYDFWGGPGETTDPW | SSDVGGYNY | EVS | CSSYAGSNNLVF | 1 |
| MS30_p87w174 | GGSFTGYY | INHSP | CARGPPTYYHDNSGYYFFDYW | SSAIGDYNY | DVS | CSSYSSSSTLVFVF | 1 |
| MS30_p87w24 | HTCA | VSFDGTKK | CARDRRSFRGADVLPRDAFDV | RSVFYSSNNKNY | WAS | CQQYYTTYSF | 1 |
| | | | W | | | | |
| MS30_p87w25 | LASFSDYY | INGRGDS | CARGRNLNFFSWYFDLW | QSISSF | SAS | CQQSYITPVTF | 1 |
| MS30_p87w3 | GGTFSSYG | IIPMFGTT | CARARGYSWDDAFDIW | QSVSSSH | GAF | CQQYGSSVTF | 1 |
| MS30_p87w55 | TFSNYW | INRDGDKK | CAVDQALRGMPSIEGWFDPW | QSLVHSDGNTY | MVS | CMQGTHWPVTF | 1 |
| MS30_p87w6 | GGSVTSHF | VNYGGRA | CARGSGQYCTNGVCYPEVFDF | QRVTNTY | GAS | CQQYGSSPPISF | 1 |
| | | | W | | | | |
| MS30_p87w8 | SNSAS | TYYRSTWS | CAKVVKDDHGWYANPFDIW | QSISSN | AAS | CQHSFTLPYTF | 1 |
| | | T | | | | | |
| MS30_p87w89 | GFTFGDYA | LRSKAYGG | CTRQRLAAVGYFDNW | NIGSKS | YDN | CQVWDSSSDHLWY | 1 |
| | | TT | | | | | |
| MS30_p92w100 | GGSINTNSYY | IDYSGST | CAGHTPLYYFDASTYQEDYW | SSNIGSNT | SCN | CAACDDSLSGPFGC | 1 |
| MS30_p92w108 | GFTFLPFS | INRDGTEE | CARAPIYFYDTPGPFDYW | QSVLHRSNHNNY | WAS | CQQYYSALITF | 1 |
| MS30_p92w129 | GGSIISNYYY | IYFSGST | CARQAYCSSTACYKFDFW | QSLLHSNGYNY | LGS | CMQSLQTPVTF | 1 |
| MS30_p92w146 | GGSFSRYY | INESGST | CANSGRITVTSVNW | QSISYY | AAS | CQQSYNTPRTF | 1 |
| MS30_p92w15 | GYTLRSYG | ISAYTGKT | CARGYGDRPWFDTW | QNVLYSSNNKNY | WAS | CQQYYTAPPHTF | 1 |
| MS30_p92w162 | GYSFTSYW | IDPSDSYT | CARKGGDTTGLLDHW | QSVRTN | GAA | CQQYNKWSTF | 1 |
| MS30_p92w35 | GGSFSWYY | INESGST | CANSGRITVTSVNW | QSISYY | AAS | CQQSYNTPRTF | 1 |
| MS30_p92w47 | GFTFSKNG | ISGSGGST | CAKDRGRDYYDFWSGTYYFDY | RSNIGSND | DTN | CGAWDSSLNAGYVF | 1 |
| | | | W | | | | |
| MS30_p92w57 | GGSLSESLYS | IFHSGAL | CAKYDFIDRYNPLGWFDPW | QSLSGNH | RAS | CQQYDFPPLTF | 1 |
| MS30_p92w89 | GYSISSNNW | IHHSGST | CARGDTYYASGAFDYW | QSLLHSNGYNY | LGS | CMQALQSYTF | 1 |
| MS30_p94w100 | GVSITTNSSY | IEYSGST | CAGHTPLYYFDASTYQEDYW | QDISNY | AAS | CQHLDSYPITF | 1 |
| MS30_p94w101 | GFTFRTYA | ISFDGSNK | CARGEVVVTAALFEHW | RSNIGRTY | SNN | CAAWEDTLSAHVVL | 1 |
| MS30_p94w14 | GFTFGSYS | ISSHGTDE | CARDSVPYVGVVTRGVYFDIW | QSVATY | DAS | CQQRSSWPPPF | 2 |
| MS30_p94w153 | GYTFTSYG | ISAYNGNT | CARCLMHYYDSSGYYYHDAFD | QSMGSY | GAS | CQQSYSIPRTF | 1 |
| | | | IW | | | | |
| MS30_p94w162 | NYTFTCQG | VIGYNGKT | CARVAAVAGIDFW | QRVRTN | GAA | CQQYNKWSTF | 1 |
| MS30_p94w163 | GYSFSDFG | ISAHNGYT | CARVVRGSGSFFYYYYGMDVW | QSISSNF | GAS | CQQYGTSPWGF | 1 |
| MS30_p94w164 | GGSVSSDNYY | IYYSGNS | CARDRYDSRGFYGVDSW | KLGDKY | QDY | CQAWDSSTKVF | 1 |
| MS30_p94w167 | GYSFATHW | IHPGDSET | CARRLSTPYYYNFVMDVW | SSHVGTYNL | EGS | CCSYARSRSDVVF | 1 |
| MS30_p94w180 | GGSISRDNYY | IYYSGST | CARESDPYGSGSFTW | QSISRW | DAS | CQQYNSYSRTF | 1 |
| MS30_p94w21 | GFTLSDHF | TRNKANRY | CARGGKGGAFDIW | QSISKY | AAS | CQQSYSTQWTF | 1 |
| | | TT | | | | | |
| MS30_p94w5 | GFPFSAFY | ISGRNIYT | CVRESLQGPAFEFDYW | QAINNN | AAS | CQQYKSSPPTF | 1 |
| MS30_p94w51 | GYTFTSYG | ISAYNGNT | CARTPMVRGVVFDYW | QSISSW | DAS | CQQYNSYSTF | 1 |
| MS30_p94w7 | GYTFSSYG | ISGYNGRR | CARAGETDYEFWSGYRYGFDV | SSDVGGHDF | EVT | CSSYAGSNTVVF | 1 |
| | | | W | | | | |
| MS30_p94w93 | GYSFTSYW | IYPGDSDT | CARPGGGYGYWYFDLW | SSDVGGYNY | DVS | CSSYTSSSTYVF | 1 |
| MS30_p99w101 | GGTFSNYA | IIPLFGTA | CARGFQKRYSSSWYYVWFDPW | SLRSSY | GKN | CNSRDSSGNHLGELF | 1 |
| MS30_p99w123 | GFTFRNFA | IRGSGSNT | CAKTNFGDYYHYGMDVW | QGISNY | AAS | CQQFYSYPLFTF | 1 |
| MS30_p99w13 | GYSLRTHW | IYPGDSHT | CASGDYYDSSGYPEYW | SGDVGGSNY | DVT | CSSYTSSSTYVF | 1 |
| MS30_p99w143 | GGTFSDYG | IIPMFHTS | CARAPLRSRSNWELLLKRVDF | QTISNNF | DAS | CQHYGSSPPFTF | 1 |
| | | | LYLDLW | | | | |
| MS30_p99w145 | GFTFSMFG | MSYDEIKE | CAKGWPGDSGADAFDVW | QSISNY | AAS | CQQSFSTPLTF | 1 |
| MS30_p99w162 | NYTFTGYG | VIAYNGKT | CARVAAVAGIDFW | QDIINN | AAS | CLHNHNYPRTF | 1 |
| MS30_p99w167 | GYSFSTYW | VYPGDSDT | CARHTGRNDYW | NRDVGGYNY | GVN | CGSFTSSGTLYVF | 1 |
| MS30_p99w171 | GFTFSGSA | IRSKSNSY | CCGQNYDNYYYAMDVW | QGISRH | AAS | CQQLISYPPITF | 1 |
| | | TT | | | | | |
| MS30_p99w21 | VFTFSSYW | INHDGSST | CVRDRGYDSSGLWNKMFDYW | SSNIGSNY | SNN | CAAWDDSLSGWVF | 1 |
| MS30_p99w22 | GFTFRSYW | MNQDGSEK | CARDKAYGDSHEYW | QSISRY | AAS | CQQSSTTPWTF | 1 |
| MS30_p99w44 | GGSISSRNFF | VYYTGSA | CARHPYCTNGVCYPSRLYW | QSISSSY | AAS | CQQYGSSPPFTF | 1 |
| MS30_p99w48 | GGSFSDSY | ISDSGSI | CARARTRQVVIPGSSSGFHPP | QSLMQTNEYKY | LGS | CMQTLQTPRTF | 1 |
| | | | PYSFYYFGMDVW | | | | |
| MS30_p99w57 | GFTFSNNV | ITSNGGST | CVRFCSGDSCYPRW | SSDVGAYNY | DVN | CCSFAGSYTWVF | 1 |
| MS30_p99w6 | TFSSYE | ITTSGSTA | CARWKDAVMGTQSNWFDPW | QSVRSY | DAS | CQHRISWPLTF | 1 |
| MS30_p99w93 | GGSFSGYY | INHSGST | CARGWVRIVGATHFDYW | SSDVGGYNY | DVS | CSSYTSSSTLVF | 1 |
| MS30_p99w97 | GFPFSTYS | INNSSSYI | CAKERGDIVVEQVANGISISI | PSNIGDNF | SNN | CAAWDDSLNGPVF | 1 |
| | | | TVWTS | | | | |
| MS31_p20w10 | GGSISSFY | IYYSGSA | CARGAEGAFDIW | GSNIGAGFD | GNS | CQSYDSSLSAYVIF | 19 |
| MS31_p20w104 | GFTFSRFS | ITSNGDSI | CARDLPDYIWGTYRPIHFDYW | QSLVHSDGNTY | KVS | CLQATHFPHLTF | 4 |
| MS31_p20w107 | GFTFNSYE | IDTSGDSI | CARHGIHMLRGWFDLW | QSISSS | GAS | CQQYYDWPPLTF | 1 |
| MS31_p20w109 | GYTFTDYY | INPNSGDT | CARAKSAPGHPFYYYYAMDVW | SSDVGDYNY | DFR | CCSYAGTFVVF | 18 |
| MS31_p20w112 | AYKLTL*G | LYRGDYDA | YSTRRYWDLP*GLSP | QAISKY | DAS | CQHYDILPFF | 1 |
| MS31_p20w119 | GYTFTDYF | INPNSGDT | CARAKSAPGHPFYYYYAMDVW | SSDVGDYNY | DFR | CCSYAGTFVVF | 2 |
| MS31_p20w136 | GYTFTDYY | INPNSGDT | CARAKSAPGHPFYNYYAMDVW | SSDVGDYNY | DFR | CCSYAGTFVVF | 4 |
| MS31_p20w14 | GFTFSTYA | ISYDGGNK | CAKDPYSNYGSIDYW | SADIGSHY | KNN | CAAWDDSVTSPNYVF | 4 |
| MS31_p20w158 | GFTFSSYG | VSGSGDSA | CAKDRGYHYGGCDYW | TSDVGGYKY | DVT | CSAYTVSGVVF | 1 |
| MS31_p20w163 | SNSAA | TYYRSKWY | CARVGYSYGLGGDAFDIW | QSISFY | AAS | CQQSYSTPVAF | 1 |
| | | N | | | | | |
| MS31_p20w176 | GGSFSGYY | INHSGST | CARNDFWSGYYPRGWFDPW | HSVTSNY | GAS | CQQYGNSPITF | 1 |
| MS31_p20w193 | STRSRRCF | SWVFLVAL | CARGMHTAIITWDAFDFW | RLGDKF | QDN | CQAWDSRIGVF | 1 |
| MS31_p20w22 | GFTFSTYG | ISGSGDSA | CAKDRGYHYGGCDYW | SSDVGGYKY | DVT | CSAYTVSGVVF | 1 |
| MS31_p20w3 | GGPISRGGYY | IFYTGTT | CARVHGGDWGVYWYFDLW | SSDIGGYNY | DVS | CSSFTSGSTLGVF | 2 |
| MS31_p20w47 | GYTFTHYG | ISGYNGDT | CAREMGDHWAGTHGLDVW | QSLNNY | ATS | CQQTLTAPRTF | 4 |
| MS31_p20w5 | D | MNPNSGNT | CARGVKSSSWYVSGGKYGIHG | SSNIGSNT | SNN | CAAWDDGLNGLPF | 1 |
| | | | MDVW | | | | |
| MS31_p20w57 | GYTFTGYY | INPNSGDT | CASAGGSSGWPQHYFDYW | QSVSSSY | GAS | CQQYGSSPFTF | 1 |
| MS31_p20w59 | GHTFTDYY | VNPNSGDT | CARAKSAPGHPFYYYYAMDVW | SSDVGDYNY | DFR | CCSYAGTFVVF | 1 |
| MS31_p20w6 | AFSFSSYG | ISYDGSNK | CVKDRIVRITTGYYNYGMDVW | QSLLHSNGYTY | WGS | CMQALETPPTF | 4 |
| MS31_p20w62 | GFTFSSYS | ISSSSSYI | CAVGEYYYDSSGYYECYFDYW | ALPKQY | KDS | CQSADSSGTYPRWVF | 1 |
| MS31_p20w69 | GFTFSSYG | VSGSGDSA | CAKDRGYHYGGCDYW | SSDVGRYNF | EVT | CSSYAGSNTFNYVF | 1 |
| MS31_p25w112 | GHTFTDYY | VNPNSGDT | CARAKSAPGHPFYYYYAMDVW | QSLLHSNGYTY | LVS | CMQALQTPPFTF | 1 |
| MS31_p25w143 | GFTFSSFW | MNSEGSSI | CARGTYVSAASMDVW | STDIGEYTF | DVN | CNSYTSRRTVIF | 1 |
| MS31_p25w146 | GGSISGYS | IYYSGAT | CARDRAGYDFDFDSW | ESVSRK | DAS | CQQYSNWPPLTF | 1 |
| MS31_p25w159 | GYTFTDYY | INPNSGDT | CARAKSAPGHPFYYYYAMDVW | SSDVGDYNY | DFR | CQSYDSSLSAYVIF | 1 |
| MS31_p25w167 | GSPFTGYY | INPNSGDT | CAILERLL**ESLLLLPTL | QSLLSSSNNKNY | WAS | CEQYYSSPLTF | 1 |
| MS31_p25w174 | SGSVRSSHYY | IYYSGNT | CATGTYSTDAFEIW | GLPKQY | KT | CQAIDSRDNWVF | 1 |
| MS31_p25w177 | GFILSTYA | FSATSGDS | CARDVAARWSGGFKRKPQYYY | SSDVGRYNF | EVT | CSSYAGSNTFNYVF | 1 |
| | | | AMDVW | | | | |
| MS31_p25w180 | GFIFSSYG | IGYDGSNK | CVRDRMGTNSGSYFFGYW | KLGDKY | QDT | CQAWDSSTGGVF | 1 |
| MS31_p25w183 | GYTFTDYY | INPNSGDT | CARAKSAPGHPFYYYYAMDVW | SSDVGDYNY | DFR | CYSYAGTFVVF | 1 |
| MS31_p25w24 | GFTFTDYA | ISSSGNYI | CVRGVGPTPRFDFW | ERINNY | RAS | CQQYDSFSITF | 1 |
| MS31_p25w5 | GITFSRDG | IWFDGSTK | CARDIFQMSKTVTPNYYGMDV | SSNIGNNF | DNN | CGTWDSSLSAGVF | 1 |
| | | | W | | | | |
| MS31_p25w59 | GFMFSSYG | ILFDGSNQ | CAKGKSGSFIYGMDVW | SSNIGSNY | RNN | CAAWDDSLSGWVF | 2 |
| MS31_p25w69 | GYTFTDYY | INPNSGDT | CARAKSAPGHPFYYYYAMDVW | SSDVGDNNY | DFR | CYSYAGTFVVF | 1 |
| MS31_p25w7 | GGSTSSFY | IYYSGSA | CARGAEGAFDIW | GSNIGAGFD | GNS | CQSYDSSLSAYVIF | 2 |
| MS31_p25w81 | GYTFTDNY | INPNSGGT | CARDAPIRDSNGYSTDYW | SSDVGDYNY | DFR | CSSYAGSNTFNYVF | 1 |
| MS31_p25w93 | GYTFTGYY | INPNSGAT | CARGISAWHTAAFDVW | QSINSRY | AAS | CQQYGSSYTF | 1 |
| MS31_p25w97 | GYTFTGFY | VNPNSGGT | CARDAPIRDSNGYSTDYW | KLGDKY | QDG | CQAWDSSTDVVF | 1 |
| MS31_p30w10 | YG | ISTYNGNT | CAREGRIGHYNDRRRGVYHSY | QSVYTNY | EVS | CQQYGDSPPWTF | 1 |
| | | | YGMDVW | | | | |
| MS31_p30w109 | GGSTSSFY | IYYSGSA | CARGAEGAFDIW | GSNIGAGFD | GNN | CQSYDSSLSTYVIF | 1 |
| MS31_p30w115 | GFMFSDYP | ISRSGGSA | CAKVHDGGNHVPFDYW | QSIGSS | YAS | CHQSSSLPWTF | 2 |
| MS31_p30w129 | GGSISSFY | IYYSGIA | CARGAEGAFDIW | GSNIGAGFD | GNS | CQSYDSRLSAYVIF | 1 |
| MS31_p30w13 | GYTFTDYY | INPNSGDT | CARAKSAPGHPFYYYYAMDVW | SSDVGDYNY | DFR | CCSYVGTFVVF | 1 |
| MS31_p30w130 | GYTFTDYY | INPNSGDT | CARAKSAPGHPFYYYYTMDVW | SSDVGDYNY | DFR | CCSYAGTFVVF | 1 |
| MS31_p30w133 | GYTFTGYY | INPNSGGT | CARAVGVTSYGMDVW | QSISSY | AAS | CQQSYSTPWTF | 1 |
| MS31_p30w143 | GYTFTGYY | INPNSGDT | CAILERLL**ESLLLLPTL | QDISSY | DAS | CQQYDNLPITF | 1 |
| MS31_p30w145 | TFSRFS | ITSNGDSI | CARDLPDYIWGTYRPIHFDYW | QSLVHSDGNTY | KVS | CLQATHFPHLTF | 1 |
| MS31_p30w159 | GYTFTDFY | INPNSGDT | CARAKSAPGHPFYYYYAMDVW | SSDVDDYNY | DFR | CCSYAGTFVVF | 1 |
| MS31_p30w168 | GFPFSNYA | ISGSGDST | CAVSFYDFWSGTDYW | QSVSSY | GAS | CQQRSNWPRTF | 1 |
| MS31_p30w18 | VCSISSFY | IYYSGIA | CARGAEGAFDIW | GSNIGAGFD | GNS | CCSYAGTFVVF | 1 |
| MS31_p30w26 | GGSISSFY | IYYSGSA | CARGAEGAFDIW | GSNIGAGFD | GNS | CCSYVGTFVVF | 1 |
| MS31_p30w37 | GYTFTDYY | VNPNSGDT | CARAKSAPGHPFYYYYAMDVW | SSDVGDYNY | DFR | CCSYAGTFVVF | 2 |
| MS31_p30w46 | GFTFSNYA | ISGSGDST | CAVSFYDFWSGTDYW | QSVSSY | GAS | CQQRSNWPRTF | 1 |
| MS31_p30w62 | GDSISNYH | FYDTGST | CARERPGRADVAYEIW | GSNIGAGFD | GNS | CCSYVGTFVVF | 1 |
| MS31_p30w7 | GYTFTDYY | INPNSGDT | CARAKSAPGHPFYFYYAMDVW | SSDVGDYNY | DFR | CCSYAGTFVVF | 1 |
| MS31_p30w94 | GLTFYSFA | ISGSGGAT | CAQTLEAAFLHSFYRGYFDNW | QSVASNY | GAS | CQQYGSTPLTF | 1 |
| MS31_p35w10 | GFTFSSYA | ISASGSST | CAKDEDSSVVTRPEIDYW | TGAVTSGHY | HTS | CLLSYSGARPVF | 1 |
| MS31_p35w101 | GCLCTLHF | INPNSGDT | CARAKSAPGHPFYYYYAMDVW | SSDVGDYNY | DFR | CQSYDSSLSAYVIF | 1 |
| MS31_p35w108 | GDSISRTTYY | IYYASST | CARVKYYQDSSGYSNWFDPW | QCINTF | AAS | CQQSYSTPLYTF | 1 |
| MS31_p35w115 | GFTFSSYP | IGYDGRIT | CARDPLPGYGDYLDHW | QNILHSSNNKNY | WAS | CQQYYSTPLTF | 1 |
| MS31_p35w145 | GFTFSNYA | IRDDGGST | CAKHWGASYYGSKNTYYYYGL | QSVLYSSNNKNY | WAS | CHQYYDTLQTF | 1 |
| | | | DVW | | | | |
| MS31_p35w15 | GFPFSAYS | ISSSSSYI | CARDYDYVWGSYPTTEYYFDY | SLRSYY | GKN | CNSRDSSGNHWVF | 1 |
| | | | W | | | | |
| MS31_p35w158 | GYTFAAYH | INPSGDTT | CASSTQIKDTGYSTGWYGYW | QSIGSS | YAS | CHQSSTFGGSWTF | 1 |
| MS31_p35w159 | GSSITNGDSY | VYYSGST | CARRAVNRGHERPYDAFDIW | SSDVGSHDL | ALT | CCSYVGRDTLDWGF | 1 |
| MS31_p35w167 | GYTFTGYY | INPNNGGT | CARAGGRDGYKVYFFDYW | QSISSY | AAS | CQQSYSSPWTI | 1 |
| MS31_p35w177 | GYTFTDYY | INPNSGHT | CARAKSAPGHPFYYYYAMDVW | SSDVGDYNY | DFR | CCSYAGTFVVF | 1 |
| MS31_p35w22 | GYTFTGYY | INPNSGGT | CARGYDVFDYW | SGSIASNY | EDN | CQSYDSSNHVVF | 1 |
| MS31_p35w3 | GFTFSSYG | ISYDGSNK | CAKDKAAVVAGYGMDVW | SGSIASNY | EDN | CQSYDTSNPYWVF | 1 |
| MS31_p35w30 | GFTFSTYG | ITGSGDSA | CAKDRGYHYGGCDYW | SSDVGVYNF | DVT | CSAYTVSGVVF | 1 |
| MS31_p35w5 | GFIFNNYA | IWHDGFNK | CARDIVHYSMIDYYNYMDVW | QSVRSRY | GAS | CQQYVSSPPRITF | 1 |
| MS31_p35w62 | GGSISSFY | IYYSGSA | CARGAEGAFDIW | GSNIGAGFD | ANS | CQSYDSSLSAYVIF | 1 |
| MS31_p35w81 | GYTFTDYY | INPNSGDT | CARAKSAPGHPFYYYYAMDVW | SSDVDDYNY | DFR | CCSYAGTFVVF | 1 |
| MS31_p35w89 | GYTFTDYY | INPNSGDT | CARAKSAPGHPFYYYYAMDVW | SRDVGDYNY | DFR | CQSYDSSLSAYVIF | 1 |
| MS37_p13w10 | GGAISSSSFY | LYYSERT | CARDGSTDYGPDWFDPW | QSVRSN | GAS | CQQYTNWLVTF | 18 |
| MS37_p13w104 | GFSFDDYA | IGWHSGTI | CAKSNAAGPYSGSGYAFYFDS | SDIDVSAYN | YDSDSNK | CMIWPSHEGVF | 5 |
| | | | W | | | | |
| MS37_p13w109 | GFPFSNYA | ISRIGDNT | CVSVASTIFGVVFPSIFESW | NIGSKS | DDS | CQVWDTSSEHYVF | 10 |
| MS37_p13w119 | GGPMTRHY | IYTRGTT | CARDAYSSSFWFFDLW | QNIDIY | AAS | CQQSFSTPWTF | 11 |
| MS37_p13w130 | GFTFSSYA | ISNSGGST | CAKASGDFVLGYFQHW | QSVLYSSNNKNY | WAS | CQQYYSTPLTF | 1 |
| MS37_p13w169 | GGPMTRHY | FYTRVTT | CARDAYSSSFWFFDLW | QNIDIY | AAS | CQQSFSTPWTF | 2 |
| MS37_p13w183 | GFPFTNYA | ISRIGDNT | CVSVSSTIFGVVFPSIFESW | NIGSKS | DDS | CQVWDTSSEHYVF | 26 |
| MS37_p13w2 | GFTFNNYA | IRGSGSNT | CAKVTFGDYFQYGLDVW | QAISSY | VAS | CQQFYSFPVTF | 5 |
| MS37_p13w57 | GFTFDNYA | VDGSGAST | CAKVGLDIRVVRGELLTWAFE | QTIDSRY | AAS | CQQYGSTTFTF | 7 |
| | | | YW | | | | |
| MS37_p13w62 | GFPFSNYA | ISRIGDNT | CVSVSSTIFGVVFPSIFESW | NIGSKS | DDS | CQVWDTSSEHYVF | 3 |
| MS37_p13w8 | GFTFSNYA | ISGSGDTT | CVKGLNYVWGSYRGEYYSYGM | QSLLTSNGNNY | LGS | CMHALQTPGF | 5 |
| | | | DVW | | | | |
| MS37_p13w94 | GFPFTNYA | ISRIGDNI | CVSVSSTIFGVVFPSIFESW | NIGSKS | DDS | CQVWDTSSEHYVF | 6 |
| MS37_p14w10 | GFPFTNSA | ISRFGDNT | CVSVSSTIFGVVFPSIFESW | NIGSKS | DDS | CQVWDTSSEHYVF | 3 |
| MS37_p14w106 | GYSFTSYG | ISAYNGNT | CARGTKYAWNVPPEDDYW | QGIRND | AAS | CLQHNTYPPFF | 3 |
| MS37_p14w108 | GGSFSGYY | INDSGGP | CARLIYGDFYYGMDVW | QGISSY | AAS | CQQFNSYPWTF | 8 |
| MS37_p14w111 | GFSLGSSGVG | IYWNDVK | CAHERPYCTSMSCSDYYGMDV | SSNIGAGSD | GDN | CQSSDSSLSGSKVF | 2 |
| | | | W | | | | |
| MS37_p14w126 | GFTFDNYA | VDGSGVST | CAKVGLDIRVVRGELLTWAFE | QTIDSRY | AAS | CQQYGSTSFTF | 5 |
| | | | YW | | | | |
| MS37_p14w146 | GFSLGSSGVG | IYWNDVK | CAHERPYCTRMSCSDYYGMDV | SSNIGAGSD | GDN | CQSSDSSLSGSKVF | 7 |
| | | | W | | | | |
| MS37_p14w158 | GFSLGSSGVG | IYWNDVK | CAHERPYCTRMTCSDYYGMDV | SSNIGAGSD | GDN | CQSSDSSLSGSKVF | 2 |
| | | | W | | | | |
| MS37_p14w162 | YNFRTYW | MYPGDSDT | CARQADAYSWDNRALYDVW | QSVSSN | GAS | CQQYNNWPLLTF | 7 |
| MS37_p14w17 | GFPFTDYA | ISRIGDNT | CVSVSTTIFGVVFPSIFESW | NIGSKS | DDS | CQVWDTSSEHFVF | 11 |
| MS37_p14w172 | GFSLGSSGVG | IYWNDVK | CAHERPYCTRMTCSDYYGMDV | QSVGSD | DIS | CQQYNNWPPWTF | 1 |
| | | | W | | | | |
| MS37_p14w175 | GGSFSGYY | INDSGST | CARGGSGGSGIYYNGPLWRYY | QSISRW | KAS | CQQYSSYPRTF | 1 |
| | | | YGMDVW | | | | |
| MS37_p14w18 | GFPFTNYA | ISRIGDNT | CVSVSSTIFGVVFPSIFESW | NIGSKS | DDT | CQVWDTSSDHYVF | 3 |
| MS37_p14w183 | GESFRGYY | IDHSGST | CARWDGGYRHGSDTYVYYGLD | QSVGSD | DIS | CQQYNNWPPWTF | 1 |
| | | | VW | | | | |
| MS37_p14w3 | GFPFTNYA | ISRIGDNT | CVSVSSAIFGVVFPSIFESW | NIGSKG | DDS | CQVWDTSSEHYVF | 1 |
| MS37_p14w36 | GCTFGNYA | ISGSGETT | CVKGLNYVWGSYRGEYYSYGM | QSLLTSNGNNY | LGS | CMHALQTPGF | 1 |
| | | | HVW | | | | |
| MS37_p14w46 | DGSFNTNY | VNHSGST | CASRDYYDYTWPVDFW | QSVGSD | DIS | CQQYNNWPPWTF | 1 |
| MS37_p14w55 | DGSFNTNY | VNHSGST | CASRDYYDYTWPVDFW | QPITTN | ATS | CQQSHSALMYSF | 1 |
| MS37_p14w6 | GFPLGRSGVG | IYWNDVK | CAHERPYCTSMSCSDYYGMDV | QGISSY | AAS | CQQFNSYPWTF | 1 |
| | | | W | | | | |
| MS37_p14w62 | GYSFTAYW | IDPSDSFT | CATSITPSYYDTVWGTFVPTS | QSVSSN | GAS | CQQYNNWPSPWTF | 5 |
| | | | MDVW | | | | |
| MS37_p14w8 | GEPLTGDY | IDHYGRT | CARGRGDYRTRGVTSYFDRW | QDIEKY | DAS | CQQYEDVPITF | 18 |
| MS37_p14w94 | TFSTYS | ISTTGSTI | CARDPGESSSWYEGVWYFDLW | QGISSNF | DAS | CQQYVTSPTF | 1 |
| MS37_p15w104 | GFPFTNYA | ISRIGDNA | CVSVSTTIFGVVFPSIFESW | NIGSKS | DDS | CQVWDTSSEHYVF | 1 |
| MS37_p15w108 | GFSLGSSGVG | IYWNDVK | CAHERAYCTRMSCSDYYGMDV | SSNIGASSD | GDN | CQSSDSSLSGSKVF | 1 |
| | | | W | | | | |
| MS37_p15w118 | GFPFTNYA | ISPIGDNT | CVSVSSTIFGVVFPSIFESW | NIGSKS | DDS | CQVWDTSSEHYVF | 8 |
| MS37_p15w119 | GESFRGYY | IDHSGST | CARWDGGYRHGSDTYFYYGLD | QSVGSD | HIS | CQQYNNWPPWTF | 1 |
| | | | VW | | | | |
| MS37_p15w126 | GFTFSNYA | ISGSGETT | CVKGLNYVWGSYRGEYYSYGM | QSLLTSNGNNY | LGS | CMHALQTPGF | 5 |
| | | | HVW | | | | |
| MS37_p15w178 | GFTFSSYA | ISGSGGST | CAKGDGYYCSGGSCYSFPDFD | QGIRND | AAS | CLQHNSYPPYTF | 1 |
| | | | YW | | | | |
| MS37_p15w20 | GFPFTNYA | ISRFGDNT | CVSVSSTIFGVVFPSIFESW | NIGSKS | DDS | CQVWDTSSEHYVF | 2 |
| MS37_p15w30 | GGSITSHY | VHYSGST | CGGDSSGWHYFDSW | QSVSRN | GAS | CQQYDNWPLAF | 4 |
| MS37_p15w47 | GFPFTNYA | ISRIGDNT | CVSVSTTIFGVVFPSIFESW | NIGSKS | DDS | CQVWDTSSEHYVF | 3 |
| MS37_p15w94 | GFTFDIYW | INQDGSQK | CAKDSGLYDYAPTMGFDSW | SSDIGAYNY | DVT | CSSYTITSTRVF | 2 |
| MS37_p16w10 | GFPFTNYA | ISRIGDNT | CVSVSSTIFGVVFPSIFESW | NIGSKS | DDS | CQVWDTSSEHFVF | 1 |
| MS37_p16w114 | GFSLGSSGVG | IYWNDFK | CAHERPFCTRMSCSDYYGMDV | SSNIGAGSD | GDN | CQSSDSSLSGSKVF | 2 |
| | | | W | | | | |
| MS37_p16w119 | GFTFDNYA | VDGSGAST | CAKVGLDIRVVRGELLTWAFE | QTIDSRY | AAS | CQQYGSTSFTF | 8 |
| | | | YW | | | | |
| MS37_p16w130 | YG | ISAYNGNT | CARSQPDVLTGYYLNYWYFDL | QSISNY | DAS | CQQRSNWPLTF | 1 |
| | | | W | | | | |
| MS37_p16w153 | TFTVSDFY | IYTGGNT | CARVNNYYFVFDIW | QSVDSRY | GTF | CQQYSYSHTF | 1 |
| MS37_p16w159 | GYTFTGFY | INPNSGGT | CARGYPGFDYW | NIGSKS | DDS | CQVWDSSSDHPVL | 2 |
| MS37_p16w163 | VFSLGSSGVG | IYWNDFK | CAHERPFCTRMSCSDYYGMDV | NIGSKS | DDS | CQVWDTSSEHYVF | 1 |
| | | | W | | | | |
| MS37_p16w164 | GGSISNYY | VYFSGTT | CARMGPEPEYSDSSGTWDYFD | QSISNF | TAS | CQQYSNWPYTF | 1 |
| | | | LW | | | | |
| MS37_p16w167 | GYTFTSYG | ISAYNANT | CARGLALDTAMSGVDYW | QSLVYSDGNTY | KVS | CMQGTHWRF | 2 |
| MS37_p16w176 | GFPFTNYA | ISRIGDNT | CVSVSTTILGVVFPSIFESW | NIGSKS | DDS | CQVWDTSSEHFVF | 2 |
| MS37_p16w183 | GFTFSIYG | ISYDGANI | CAKGRSVMTTEVPDSW | QGISGW | AAS | CQQYSTYPLTF | 3 |
| MS37_p16w47 | GFPFTNYA | ISRIGDNT | CVSVSTTIFGVVFPSIFESW | NIGSKN | DDS | CQVWDTSSEHYVF | 1 |
| MS37_p16w51 | GGPISTSSYY | IYSSGTT | CARPLGTLTHLEDTSSHWFDP | QSISNY | DAS | CQQRSNWPLTF | 1 |
| | | | W | | | | |
| MS37_p17w101 | GDSVSSNSVA | TYYRSKWY | CARGPIDAFDIW | SSNIGSTF | RNN | CAAWDDSLSGWVF | 1 |
| | | N | | | | | |
| MS37_p17w114 | GFPFSNYA | ISLIGDKT | CVSVSSTIFGVVFPSIFESW | NIGSKS | DDS | CQVWDTSSEHYVF | 3 |
| MS37_p17w130 | AFPLGRRGVG | IYWNDVK | CAHERPYCTRMSCSDYYGMDV | STNIGAGYD | DNK | CQSYDRSLNGWVL | 1 |
| | | | W | | | | |
| MS37_p17w25 | GYTFTTFG | ITVYNGNT | CARAWHPDSWFDPW | SSNIGAGYD | GNT | CQSFDSSVSDSAVF | 2 |
| MS37_p17w6 | GFPFSNYA | ISLIGDNT | CVSVSSTIFGVVFPSIFESW | NIGSKS | DDS | CQVWDTSSEHYVF | 6 |
| MS37_p17w82 | GGAISSSSFY | LYYSERT | CARDAYSSSFWFFDLW | QSVRSN | GAS | CQQYTNWLVTF | 1 |
| MS37_p17w97 | GYTFTGHY | INPNSGDT | CARPDDGNSVFDYW | SGHSRYT | LYSDGSH | CQTWGTGTQGWVF | 2 |
| MS37_p18w101 | GASFSGYY | INHREKT | CARALYDDDIWSGPFYYYGMD | QSISDW | KAS | CQQYNNYPYTF | 2 |
| | | | VW | | | | |
| MS37_p18w106 | GYTFNSYG | ISAYNGNT | CARGSGYSAVAEFDPW | QGIRND | TAS | CLQHNSYPPTF | 1 |
| MS37_p18w111 | GDSVSSNSAA | TYYRSKWYN | CASGPTDAFDIW | SSNIGSNY | RNN | CAAWDDSLSGWVF | 2 |
| MS37_p18w119 | GESFRGYY | IDHSGST | CARWDGGYRHGSDTYFYYGLD | QSVGSD | DIS | CQQYNNWPPWTF | 4 |
| | | | VW | | | | |
| MS37_p18w169 | GYSFTGYY | INPHTGGK | CARGARNYGPGYNWFDPW | QSISSW | QAS | CQQYNSDSVRF | 4 |
| MS37_p18w183 | GFSLRTSGAG | IYWNDDK | CAHSPRRYDFRSGYYSLPDVW | SGHNSYA | LNSDGSH | CQTWGTGGGVF | 1 |
| MS37_p18w20 | GFSLGSSGVG | IYWNDVK | CAHERPYCTRMSCSDYYGMDV | SSNIGSNY | RNN | CAAWDDSLSGWVF | 1 |
| | | | W | | | | |
| MS37_p18w26 | GGSFSGYY | INHNENT | CARDFHRPEHHCSIGSCYGFD | QSISTY | AAS | CQHSYNAPYTF | 2 |
| | | | VW | | | | |
| MS37_p18w35 | GFSLTDPTMG | IFSSGEK | CARIRPDQWLVTTSRPSYYFD | ALPKKY | EDN | CYSTDSSGNHGVF | 1 |
| | | | FW | | | | |
| MS37_p18w44 | GFPFTDYA | ISRIGDNT | CVSVSTTIFGVVFPSIFESW | NIGSKS | DDT | CQVWDTSSEHFVF | 1 |
| MS37_p18w59 | GYSFTSYG | ISGDNGNT | CARGTKYGWNVPPEDDYW | QGIRND | AAS | CLQHNTYPPFF | 1 |
| MS37_p18w62 | GYTFTAYY | INPYSGGT | CAAGPAPASSTWPSNWFDPW | QSVNNY | DAS | CQQRSNWPPFTWTF | 2 |
| MS37_p18w8 | GGPFSGYY | INQSGST | CASSYIFIGPPARAMGDPQWR | QSVGSNF | GAS | CQQCGTSPWTF | 1 |
| | | | HRRGRFDFW | | | | |
| MS37_p19w112 | GIIFTNYW | INIDGSDT | CVRVYYDFWSAPRGMDVW | QSLLHRNGYNY | LSS | CMQALQTPPTF | 1 |
| MS37_p19w119 | GGSFSGYY | ISHSGNT | CARGTLTAEYYFDYW | QRVSDY | DTS | CQQRSGWPTF | 9 |
| MS37_p19w143 | GYSFTSYD | MNPNSGNT | CARGGGYSGYGGDYFDYW | NIGSKN | RDT | CQVWDSSTGVF | 1 |
| MS37_p19w15 | GLPFTNYA | ISRIGDNT | CVSVSSTIFGVVFPSIFESW | NIGSKS | DDS | CQVWDTSSEHYVF | 2 |
| MS37_p19w35 | GFSLGSSGVG | IYWNDVK | CAHERPYCTRMSCSDYYGMDV | SSNIGAGSD | GDN | CQSSDSSLSDSKVF | 1 |
| | | | W | | | | |
| MS37_p19w37 | GGTFSRYG | IIPTVGNT | CARDPIRPSSDDFWSGREDRY | SPNIGNNY | RNN | CAAWDDSLSAWVF | 1 |
| | | | YYFYYGMDVW | | | | |
| MS37_p20w130 | GFTFSSHW | INTDGSRT | CARDAKEARVFDFW | QTISVY | TAS | CQQTYSTPWTF | 1 |
| MS37_p20w145 | GGSFSGYY | INDSGGP | CARLIHGDLYYGMDVW | QGISSY | AAS | CQQFNSYPWTF | 1 |
| MS37_p20w159 | GYTFTAYY | INPYSGGT | CAAGPAPASSTWPSNWFDPW | QRVSDY | DTS | CQQRSGWPTF | 1 |
| MS37_p20w69 | GFNFKTHA | ISGSGSRT | CARRRYDILTGYLHFYAMDVW | QSISNW | KAS | CQQYNSYWTF | 1 |
| MS37_p20w81 | GYSFSNYW | IYPGDSDT | CARHRDYYYYGMDVW | SGSIASNY | EDN | CQSYDSSTLTVF | 1 |
| MS37_p21w13 | GFSLSNAAMG | IFSNDGK | CARRMAAPGQGRVYFDYW | SSNIGNNY | DNN | CGTWDSSLSAWVF | 1 |
| MS37_p21w130 | GYTFTGHY | INPNSGGT | CARPDDGNSVFDYW | SGHSRYT | LYSDGSH | CQTWGTGIQGWVF | 1 |
| MS37_p21w136 | GFTFSSYA | ITGSGDST | CAKDRRFDYYDSSGYYYHDYW | QSISTY | AAS | CQQSYSTPRLTF | 1 |
| MS37_p21w14 | GFSFNNHG | ISSDGNDK | CATPATPRPLVYTSGWYYLDY | SSDVGGYNY | GVN | CSSYAGSNSLVF | 1 |
| | | | W | | | | |
| MS37_p21w2 | GFPFTDYA | ISRIGDNT | CVSVSTSIFGVVFPSIFESW | NIGSKS | DDS | CQVWDSSSEHFVF | 1 |
| MS37_p21w26 | GFSLRNAAMG | IFSNDGK | CARRMAAPGQGRVYFDYW | NIGSKS | DDS | CQVWDTGSEHYVF | 1 |
| MS37_p21w47 | GFRFSNFG | IAYDGTNR | CAKSSRWYDSYYYGMDVW | TSDVGTYNR | EVS | CSSYTRSSTLVF | 2 |
| MS37_p21w6 | GYTFTGFY | INPNSGGT | CARTYDFWSGYFTPPGYW | SSNIGSNY | RNN | CAAWDDSLSGPVF | 1 |
| MS37_p21w82 | GFSFSSYA | VSFDGSSQ | CAKRGPQSGSYFEYW | SSDVGNYDF | EVT | CCSYAGPPTLYVF | 1 |
| MS37_p21w92 | GFAFTNYA | ISRVGDNT | CVSVSSTIFGVVFPSIFESW | NIGSKS | DDS | CQVWDTGSEHYVF | 3 |
| MS37_p21w97 | GFTFSDYF | ISGTNGYT | CVCQRFSTYYFDSW | SSNIGANYD | GNS | CQSYDSSLSIYVF | 1 |
| MS37_p22w100 | GFTFSSYA | ISGSGGST | CAKDSYCSSTTCYMDYW | QSVSSY | DAS | CQHRSNWPPWTF | 1 |
| MS37_p22w106 | GFSLSDPTMG | IFSNDEK | CARSGFCSSTSCLNLDFW | QDIGVW | EAS | CQQYNTYPWTF | 1 |
| MS37_p22w112 | GGSFRGYY | INNWGNT | CVRGGYWQFDFW | TGAVTSGYY | TTN | CLLYHGDAQLWVF | 2 |
| MS37_p22w153 | GDSVSSNSAA | TYYRSKWY | CARGATRAYYFDYW | QTISSW | KAS | CQQYNSYSVTF | 1 |
| | | N | | | | | |
| MS37_p22w158 | GFSLSDPTMG | IFSNDEK | CARSGFCSSTSCLNLDFW | SLRTYY | GKN | CNSRDSSANHVVF | 1 |
| MS37_p22w172 | GFSLGSSGVG | IYWNDVK | CAHERPYCTRMRCSDYYGMDV | SSNIGAGSD | GDN | CQSSDSSLSGSKVF | 1 |
| | | | W | | | | |
| MS37_p22w2 | GFPFTNYA | ISRIGDNT | CVSVSSTIFGVVFPSIFESW | NIGSKS | DDS | CQVWDTGSEHYVF | 2 |
| MS37_p22w44 | GYSFTGYY | INPHTGGK | CARGARNYGPGYNWFDPW | QSLVYSDGNTY | KVS | CMQGTHWRF | 1 |
| MS37_p22w81 | GFSLNDPTVG | IFSNDEK | CARSGFCFSTHCLNLDFW | QNIGVW | EAS | CHQYNTYPWTF | 1 |
| MS37_p23w10 | GYTFTGYY | INLNSGGT | CARLGLRGGFYPYYFDYW | SGSVSTSYY | NTN | CVLYMSSGFWVF | 1 |
| MS37_p23w126 | GFTFSSYG | ISYDGSNK | CAKDLGAVAGGGVYFYYGMDV | SSDVGSYNL | EGS | CCSYAGSSWVF | 1 |
| | | | W | | | | |
| MS37_p23w143 | GFPFTNYA | ISRFGDNT | CVSVSSTIFGVVFPSIFESW | NIGSKS | DDS | CQVWDTSSEHFVF | 1 |
| MS37_p23w145 | GFTFSTYS | ISPSGTNI | CARSGPFPGRVVRWGYFDYW | QSVSGH | DAS | CQQRSDWPPTF | 2 |
| MS37_p23w158 | GYSFTSFW | IYPGDSDT | CARLETVTTNFDFW | SSDVGSYNL | EGS | CCSYAGSSWVF | 1 |
| MS37_p23w163 | GGPMTRHY | IYTRGTT | CARDAYSSSFWFFDLW | QSVRSN | GAS | CQQYNNWPSPWTF | 1 |
| MS37_p23w167 | GYTFTGHY | INPNSGDT | CARPDDGNSVFDSW | SGHSRYT | LYSDGSH | CQTWGTGTQGWVF | 1 |
| MS37_p23w168 | GLTFSKAW | IKSKSDGG | CTTGGQLRRPYW | KLGDKY | QDT | CQAWDVNTEVF | 1 |
| | | TT | | | | | |
| MS37_p23w17 | GFPFSDYA | ISRIGDNT | CVSVSTTIFGVIFPSIFESW | NIGSKS | DDS | CQVWDTSSEHYVF | 3 |
| MS37_p23w171 | GYSFTSFW | IYPGDSDT | CARLETVTTNFDFW | SGSIASNY | EDN | CQSYDSSNLLF | 1 |
| MS37_p23w175 | GYTFTNYF | VNPRRGTA | CAKGGTYHDYWSGYSDAFDMW | TGTVTIGHY | DAN | CLLSYSGADWVF | 1 |
| MS37_p23w176 | GFPFTDYA | ISRIGDNT | CVSVSTTIFGVVFPSIFESW | NIGSKS | DDS | CQVWDTGSEHYVF | 1 |
| MS37_p23w21 | GYTFTSYG | ISAYNGNT | CARGIRGWNDGTDYW | QGIRND | AAS | CLQHNSYPPTF | 1 |
| MS37_p23w24 | GGSFSGYY | INHSGST | CARANRRYSYGYNYHYYGMDV | ALPKKY | EDS | CYSTDSSGNPRGF | 1 |
| | | | W | | | | |
| MS37_p23w3 | GLTVSSTH | IHSDGGT | CVNFGAITSRPW | TGAVTTGHY | DTT | CSLYYSGGVCVF | 1 |
| MS37_p23w30 | GGSFSGYY | INQSGRT | CVHTERNSYDSSGYRGRFDFW | QSVSSSY | GTS | CQQYGTSPWTF | 2 |
| MS37_p23w58 | GGSISDSSYY | IYYSGST | CARMSIDENFDYW | ALPKQY | KDS | CQSVDNSGIYVF | 1 |
| MS37_p23w82 | GGSFSGYY | INHNENT | CARDFHRPDHHCSIGSCYGFD | QSISTY | AAS | CQHSYIAPYTF | 1 |
| | | | VW | | | | |
| MS37_p23w83 | DFSLGSSGVG | IYWNDVK | CAHERPYCTRMSCSDYYGMDV | SSNIGAGSD | GDN | CQSSDSSLSGSKVF | 2 |
| | | | W | | | | |
| MS37_p23w92 | GFPFDTYS | ISSSSRYI | CAKDWGPDLWFGDGSRQFYGM | QSISNNY | GAS | CQQYGSSPRTF | 1 |
| | | | DAW | | | | |
| MS37_p24w10 | GFAFRDYG | LHAYTDTI | CARDKIGSFCIDHW | DSDVAAYNH | GVT | CTSFTTFTTWVF | 1 |
| MS37_p24w108 | GFTFSKYA | ISGSGDTT | CVKGLNYVWGIYRGEYYSYGM | QSLLTSNGNNY | LGS | CMHALQTPGF | 1 |
| | | | DVW | | | | |
| MS37_p24w127 | GFSLGSSGVG | IYWNDVK | CAHERSYCTRMSCSDYYGMDV | SSNIGAGSD | GDN | CQSSDSSLSGSKVF | 1 |
| | | | W | | | | |
| MS37_p24w130 | GESFRGYS | IDHSGST | CARWDGGYRHGSDTYVYYGLD | QSVGSD | DIS | CQQYNNWPPWTF | 1 |
| | | | VW | | | | |
| MS37_p24w145 | GGSISSYY | ISYSGST | CARQKSYYDRGGYWLEGDRSL | QIVSFSF | GAS | CQQYGRSPSTF | 2 |
| | | | AFEYW | | | | |
| MS37_p24w169 | GFPFSNYA | ISLIGDKT | CVSVSSTIFGVVFPSIFESW | NIGSKS | DDS | GQVWDTSSEHYVF | 1 |
| MS37_p24w17 | GYTFTSYG | ISAYNGNT | CASQQSYNWNDVALDCW | QGIRND | AAS | CLQHNSYPPTF | 2 |
| MS37_p24w178 | GFPFTNYA | ISRFGDNT | CVSVSSTIFGVVFPSIFESW | KIGSKS | DDS | CQVWDSSSEHYVF | 2 |
| MS37_p24w18 | GGSFSGYY | INHSGST | CARANRRYSYGYNYHYYGMDV | ALPKKS | EGS | CYSTDSSGNPCGF | 1 |
| | | | W | | | | |
| MS37_p24w180 | GYTFTDCY | INPNSGGT | CVREGLDYSGSFQFDFW | QSVNNY | DAS | CHQRSGWLTF | 1 |
| MS37_p24w20 | GFPFTNSA | ISRFGDNT | CVSVSSTIFGVVFPSIFESW | NIVSKS | DDS | CQVWDTSSEHFVF | 1 |
| MS37_p24w26 | EYTFIDYY | INPKSGDT | CARDSRYCVGGTCKYLKRW | QSVDYNY | GVS | CQQYFGSSLTF | 1 |
| MS37_p24w39 | TGSITTDS | ISGSGRT | CARDRHDWYFDLW | RSDIGGYNS | DVS | CVSYSSGPSPWVF | 1 |
| MS37_p24w48 | GDSISSFH | APNNGDT | CVVYYYGRGGQGFW | QNINTW | MAS | CQQFRTFIWTF | 1 |
| MS37_p24w6 | GYTFTSYG | ISAYNGNT | CASQQSYNWNDVALDCW | QAISSY | VAS | CQQFYSFPVTF | 1 |
| MS37_p24w81 | GYTFTAYY | INPNSGDT | CARDSYYDYVWGSYRLLYGMD | QSLVYSDGSTY | KVS | CMQGTHWPPLF | 1 |
| | | | VW | | | | |
| MS37_p25w10 | GFPFTDYA | ISRIGDNT | CVSVSTTIFGVVFPSIFESW | NIGSKS | DDT | CQVWDTSSEHYVF | 1 |
| MS37_p25w100 | GYTFSSYG | ISAYSGNT | CARGSGYSAVAEFDPW | QGIRND | TAS | CLQHNSYPPTF | 1 |
| MS37_p25w114 | GFPFTDYA | ISRIGDNT | CVSVSTTIFGVVFPSIFESW | NIGSKS | DDS | CQVWDTSSEHYVF | 1 |
| MS37_p25w129 | GFSVSTNY | IYSGGTT | CAKDLAHSDFWSGYLDTW | QSLGKY | DAS | CQQRSNWPLYSF | 1 |
| MS37_p25w14 | GFTFSNYG | ISYDGSNK | CAKLWGGYGDYIGRGEGFDFW | QSISSW | KAS | CQQYDSYLLTF | 2 |
| MS37_p25w167 | GFSLGSSGVG | IYWNDFK | CAHERPFCTRMRCSDYYGMDV | SSNIGAGSD | GDN | CQSSDSSLSGSKVF | 1 |
| | | | W | | | | |
| MS37_p25w177 | GFTFSSYS | ISSSSSTI | CARAHTHCTNGVCSDAFDIW | QGIRND | AAS | CLQDYSYPLTF | 1 |
| MS37_p25w35 | GYTFTSYG | ISAYNGNT | CARGSGYSAVAEFDPW | QGIRND | TAS | CLQHNSYPPTF | 1 |
| MS37_p25w48 | GFPFSNYA | ISLIGDNT | CVSVSSTIFGVVFPSIFESW | NIGSKS | DDS | CQVWDSSSDHPVVF | 1 |
| MS37_p25w57 | GFPFSDYA | ISRIGDNT | CVSVSTTIFGVIFPSIFESW | NIGSKS | DDS | CQVWDSSSDHPVVF | 1 |
| MS37_p25w59 | GFSFSSHG | ISSSSSTI | CARRLWITFGGVIANDYW | QSVGSN | GAS | CQQYNNWPPITF | 1 |
| MS37_p25w8 | GVSITRSTDY | TYHIGST | CARHLSSGWLKLGFDYW | QGIRTW | AAS | CQQTNSFPITF | 1 |
| MS37_p25w81 | GFPFSNYA | ISRFGDNT | CVSVASTIFGVVFPSIFESW | NIGSKS | DDS | CQVWDSSSDHPVVF | 1 |
| MS37_p25w83 | GFTVSSNY | IYSGGST | CAREKAVAGKGGYYYYGMDVW | QRVSSSY | GAS | CQQYGGSPWTF | 1 |
| MS37_p25w89 | GGSFSGYY | INDSGGP | CARLIYGDLYYGMDVW | QGISSY | SAS | CQQFNSYPWTF | 1 |
| MS39_p24w100 | GGSINSYF | IYYSGST | CAASPPRGDIVIVPVAAFDFW | QSVSSD | GAS | CQQYNNWPRTF | 1 |
| MS39_p24w106 | GDSIASSSW | IYHSGHT | CARVKEDIVVGPAGKDYYYYM | QDINNY | DAS | CQQYDDLPLFTF | 1 |
| | | | DVW | | | | |
| MS39_p24w107 | GGSISASSYY | IYYDGST | CARPTPGLYDSWTGFPNGDTC | QSVSNSY | GAS | CQQYGSSPLTF | 1 |
| | | | CYMDVW | | | | |
| MS39_p24w108 | GGSISNYY | IRYSGST | CARTSEYDFWSGYYGFGPW | QSLLHSNGYNY | MGS | CMQAVQTPLTF | 4 |
| MS39_p24w109 | GFTFTDYW | VKEDGSEQ | CARRRQISSSIYFDYW | QGIRND | AIS | CLQDYAYPYTF | 16 |
| MS39_p24w111 | GITFTNAW | IMSENDGG | CTTQKTPYSNPVYFDYW | QGIANF | AAS | CQQANSFPPRAAYTF | 4 |
| | | AI | | | | | |
| MS39_p24w112 | GFSLSTSGMR | IDWNDDK | CARSGFCSGGSCYANWFDSW | QFVSSNY | DTS | CQQYATSPLTF | 1 |
| MS39_p24w114 | AFTFSNYW | IREDGSER | CARVVGLDYGDYGDRRLGEYY | QSIDTW | KAS | CQQYNSYLLTF | 3 |
| | | | FDYW | | | | |
| MS39_p24w115 | GSTFRNSW | IKEDGNEK | CARDGTMTIFGVVYLGWFDTW | QNILYNSNNKNY | WAS | CQQYYKTPRTF | 1 |
| MS39_p24w122 | GFTFSNYA | ISGTGGST | CAKDATDFRSGPRPGFYYYYM | QEISNY | DAS | CQKYNSALRTF | 4 |
| | | | DVW | | | | |
| MS39_p24w130 | GGSISRSNYF | IYYSGGT | CARHFDGGYYYMDFW | QDISSY | AAS | CQHYHGYPITF | 1 |
| MS39_p24w136 | GGSISSNNYY | VFYSGST | CARAQEWLELDGFDMW | QGIRND | GAS | CLQHNSYPYTF | 19 |
| MS39_p24w143 | GGSISSYY | INYSGNT | CARVTSGYSTMWKWGMGEPAT | QSVSSY | DAS | CQHRSNWPLALTF | 1 |
| | | | YYYYMDVW | | | | |
| MS39_p24w144 | GGSISASNYY | IFYSGST | AFVRYSRGHYPPHYYFMDVW | QSINNW | EAS | CQQYSSYFFTF | 2 |
| MS39_p24w145 | GGSISSSSQY | IYESGST | CARLKGNRGYYYMDVW | KIGSKN | RDT | CQVWDSSTEEVF | 1 |
| MS39_p24w146 | GFTFSHYW | IKQDGSET | CAHRIAGAYY | ESLLHDNGFNY | LGS | CMQALLTYTF | 5 |
| MS39_p24w163 | GDSISTYY | ISYSGST | CAREGYSHGYSYYYYYMDVW | QSISNY | AAS | CQQSYNIPRTF | 1 |
| MS39_p2w174 | GFTFSNYW | INQDGSEK | CTRDPPYFDNW | QSLVYSDGRTY | KIS | CMQGSHWPVTF | 2 |
| MS39_p24w168 | GDSISSKNW | IYHSGSV | CARREVGYRLLYGDW | QSVISSY | GTS | CQQYGNSPYTF | 2 |
| MS39_p24w169 | GFSFSTYW | IKGDGSEA | CARHPGSGYYYGWNFDLW | QSVLFNSNNKHY | WAS | CQQYQSIPLTF | 6 |
| MS39_p24w17 | GDSIASSSW | IYHSGHT | CARVKEDIVVGPAGKDYYYYM | QSITTY | AAS | CQQRNTF | 6 |
| | | | DVW | | | | |
| MS39_p24w172 | GDSVSSSNW | IYHSGST | CARGGGYYDSSILIDYW | QGISSF | GAS | CQQLYSYPRTF | 1 |
| MS39_p24w174 | GFTFSNHW | IKRDGSEK | CVRVSLHWARLDYW | QDINNY | DAS | CQQYDDLPLFTF | 7 |
| MS39_p24w177 | GDSVSGGNYY | VYYTGST | CARESYISLDSW | SSNITNNY | KNN | CATWDDSLS | 1 |
| MS39_p24w178 | GESFSDYY | VNRIGNT | CARGRKIVVTVDHWERPNGFD | RSVSSTY | GAS | CQQYGRSPFTF | 1 |
| | | | IW | | | | |
| MS39_p24w180 | GGSISSSSYY | IYYSGST | CARQYLGSSSSGDYW | QSVSSY | DAS | CQQRSNWPPSTTF | 1 |
| MS39_p24w187 | GGSISGSSYY | IYYLGST | CARHEVADMVIVAAALDVW | QSISSW | KAS | CQQYNSYGLTF | 1 |
| MS39_p24w2 | GFTLSSYE | IDSSSDTM | CARDPYLELQWRAFDIW | QGIGDW | AAS | CQQGHTFPPLTF | 5 |
| MS39_p24w24 | GFSLNTAGMC | VDWDGDT | CVRTTVPAAIEGAVRFYYYYL | QDIANY | DGS | CQQYDNVPLTF | 1 |
| | | | DVW | | | | |
| MS39_p24w25 | DGSISSSSYF | ISYSGST | CARQHHGDHYYYYMDVW | QSVSSN | GAS | CQQYNNWLYTF | 1 |
| MS39_p24w26 | GFIFSNYA | ISVGGTST | CARANKYVGSWYFFDYW | ESVGTN | DAS | CQQYDSWPPWAF | 1 |
| MS39_p24w30 | GGSVRSGDYY | VYYSGNT | CARDRIAVTATPGLLDYW | QSISSW | KAS | CQQYNSYPWTF | 1 |
| MS39_p24w44 | LNTDGMR | IDWDDDK | CARNNYYDNSGYSYWYFDLW | QSINNY | ATF | CQQSYTNPFTF | 1 |
| MS39_p24w48 | GGSISSNSYF | MYYSGST | CARHKEVAIATDYYYYMDVW | QSIGTY | AAS | CQQSYSTLSTF | 1 |
| MS39_p24w5 | GYTFTFYY | INPSDGST | CARDSGITFGGLPLNYFDHW | QSISSTN | SIS | CQQYGNSLRTF | 4 |
| MS39_p24w6 | GFSLSTSGVS | IYWDDDK | CAHTNSPINGYYFFDYW | QSVSSN | GAS | CQQYDNWPLYTF | 1 |
| MS39_p24w69 | GGSIGSYY | IYHVGST | CARGPPLTTPTSWSFFFDIW | QIISSW | KAS | CQHYNSYPWTF | 1 |
| MS39_p24w8 | GGSISNYY | IYYTGTT | CAREGSGGYYNWFDPW | QSVLYSSNNMNY | WAS | CQQYYSAPYTF | 4 |
| MS39_p24w81 | GGSFSGYY | INHSGST | CARPGNYLRRWNSGTYYHFDF | QSVLYSSDNKNY | WAS | CQQYYTTPTF | 1 |
| | | | W | | | | |
| MS39_p24w82 | SGSFSDHT | IDYSGST | CARGSRIGGVLAWGPTYNYCY | QSVGSN | DAS | CQQRTNWPPRTLTF | 1 |
| | | | MDVW | | | | |
| MS39_p2w100 | GFSFSSYW | IKQDGSEK | CARYYTRTIYDHDAFDIW | QGISSY | AAS | CQQLNSYPLTF | 1 |
| MS39_p2w101 | GDSISSSNW | IYHSGST | CARSPYDILTGYTDPSDIW | QFVSRY | DAS | CHQRSNWPPLTF | 1 |
| MS39_p2w109 | GGSFSGYY | INPDGST | CAREPGHYYMDVW | QSVLYSSNNKNY | WAS | CQQYYSTPRTF | 1 |
| MS39_p2w114 | GGSISSNNYY | VFYSGST | CARAQEWLELDGFDMW | KIGSKN | RDT | CQVWDSSTEEVF | 1 |
| MS39_p2w119 | GFSLNTERMR | IDWDNHK | CARMGLGWDYFDSW | QSVSNN | GAS | CQQYNDWPRYTF | 3 |
| MS39_p2w122 | GDSISSSNYY | IHYSGST | CARRGGYYFIDYW | QSFSSY | AAS | CQQSYSTLWTF | 1 |
| MS39_p2w127 | GASISGSNW | IYHSEIT | CARDQVRGDFWSGSGDAFDVW | QSVLYSSNNKNY | WAS | CQQYHGSPRTF | 1 |
| MS39_p2w130 | GVSISSSNW | MFLSGST | CARRTMFNYYFDYW | QSVSSY | DAS | CQQRHNWVTF | 2 |
| MS39_p2w144 | GGSVNSINW | IYYSGST | CARDPGGHDYVWGSYYDW | QSLLYSDGYNH | LGS | CMQTLQTPRTF | 1 |
| MS39_p2w153 | GDSISRSNW | IHHSGRT | CARDAGYCRGGSCYDYW | QSVSSN | DAS | CQQYDNWPPLTF | 1 |
| MS39_p2w159 | GGSISSYY | IYHSGST | CAREHRDYYDSSGYYDRW | QSISSW | KAS | CQQYNSYSGTF | 1 |
| MS39_p2w162 | GYTFISYY | INSSGGST | CARGGPTYYYGSGSQLYW | NIGSKS | DNS | CQVWDTIIDPYVVF | 1 |
| MS39_p2w169 | GFTFSSYA | LSGSGGST | CAKAMRWELRSSDYW | SSDVGGYNY | EVS | CSSYTSSSTLGVF | 1 |
| MS39_p2w171 | GGSISTYY | ISYNGNT | CARDVFTGWNHHVGLYNWFDP | QSVSSY | DAF | CQQRSNWPPTF | 1 |
| | | | W | | | | |
| MS39_p2w176 | GYKFTSYG | ISVYNGNT | CARDWYYDSRRDAFDIW | QGLVFSDGNTY | KVS | CMQGTHWPWTF | 1 |
| MS39_p2w177 | EGTFNNYA | IIPIFDTT | CAGGLVTVSGVVIHAGRDWFD | QDISSS | AAS | CQQYYTYPPTF | 1 |
| | | | PW | | | | |
| MS39_p2w178 | GGSISSSSQY | VYETGST | CARLRGNRGYYYMDVW | KIGSKN | RDS | CHVWDSSTEEVF | 1 |
| MS39_p2w180 | GFTFSSNW | INQDGSEK | CARPGYCIGGNCYGRVRLYFQ | QDISNY | GST | CQQYDNLPITF | 1 |
| | | | SW | | | | |
| MS39_p2w184 | GGSINSNNW | IYHDGTA | CARGDNSDRFQISYYFDYW | QSVLYSSNNQNY | WAS | CQQYYSIPNTF | 1 |
| MS39_p2w185 | GFTFGQYA | ISSSDDNR | CAKDWGLFRGGDGYSYYFDYW | NIGSRS | DDT | CQLWDTFSDHFVF | 1 |
| MS39_p2w26 | GFTFSSYA | ISYDGSNK | CARVHDHGDYGWFDPW | QSVSIY | DAS | CQQRRNWPPITF | 1 |
| MS39_p2w36 | GFAFSTSW | IDQAGTVV | CARNRGYQQFDYW | SGDIGRYNY | DVT | CNSFGGLF | 1 |
| MS39_p2w47 | GYNFNDYY | INPDGGGT | CARDEAGRTMSVPFFDYW | QNILYNSNNKNY | WAS | CQQYYTYPYTF | 1 |
| MS39_p2w48 | GFSLSTSGLR | IDWDDDK | CARDYYFDSSGYRFDYW | QDISNY | DAS | CQQFDHLYTF | 1 |
| MS39_p2w62 | GGSIVSYY | IYYSGST | CARGGGGFHDPSPNYSPDYW | QGIRND | AAS | CLQYNSYPPTF | 3 |
| MS39_p2w69 | GFTLTNYA | ISGPTGST | CAKGRDPVENVVIFPFDCW | QDINMW | KAS | CQQYYSLHSF | 1 |
| MS39_p2w7 | GYTFISYG | ISAYNGYT | CARDGLTYCGGECFFAYW | QSVSSSY | GAS | CQQYVSSPLTF | 1 |
| MS39_p2w89 | GDTFSNYA | IIPIYDTV | CARDGWRYDGRGHYELNYYYM | QTVSSN | GAS | CQQYKNWPPTF | 1 |
| | | | NVW | | | | |
| MS39_p3w100 | GFSFSNYV | LSAGGGAT | CVKNQGIYGSGSYPADTFHIW | QNIFHSSNNKIY | WAS | CQQYFSTPFTF | 1 |
| MS39_p3w101 | GGSISSSSYY | VYYIGNS | CARGGYYYYYMDVW | QSVNSDY | GAS | CQQYFSSPHTF | 3 |
| MS39_p3w118 | GFSFSTPGMA | INWDDDE | CAHRGFYQPQYFDTSAYYYW | SSNIARHY | NNN | CAVWDDSLSGWVF | 1 |
| MS39_p3w119 | GFSLTTPGLT | IFGDGET | CAHSHAIGDNYLSYFDFW | QSVLYDPNKKNY | WAS | CQQYYSGPITF | 1 |
| MS39_p3w126 | GFTFSNYA | ISGGDHST | CAKGFGDYRYYYYMDVW | ESLVHSDGNTY | KIS | CMQAKQFPLTF | 1 |
| MS39_p3w127 | GD | ISPFGTS | CAARPPFLGYRDSTICHVGSA | QSLLHFNGYSY | LGS | CMQVLQTPRTF | 1 |
| | | | P | | | | |
| MS39_p3w144 | GFTFTSYW | IKEDGNEK | CARDLTVFGVLDYYYMDVW | QSLLHSNAYNY | LTS | CMQALQTPHTF | 2 |
| MS39_p3w145 | GFSLNTSGVG | IYWNDDE | CAHNGGYDFRSGYYWAHWFDP | QSLSSRY | GAS | CQQYDSSFTF | 1 |
| | | | W | | | | |
| MS39_p3w163 | HGSISTYH | IYYIGST | CARGPPTGEWSYYFDNW | QDVSSW | KAS | CQHYNSYPWTF | 1 |
| MS39_p3w17 | GFTFSSYW | IKQDGSEK | CARDRWSGSFGGAPLDSW | QDVTNY | EAS | CQQYDILPPTF | 1 |
| MS39_p3w175 | GDAVSSGSYY | VYHTGST | CARGVGLAGAGTSFDYW | QSVLYSSNNINY | WAS | CQQYYTTPATF | 1 |
| MS39_p3w184 | GGSISSTNYY | VYHSGST | CARRDDFWSGYYDYW | RTINTY | AAS | CHQTYSPPQTF | 1 |
| MS39_p3w25 | GGSVSSGTYW | IYYSGST | CARLGVGELSLLGFGAFDIW | QSVNSN | GAS | CQQYNTWPLAF | 1 |
| MS39_p3w3 | GFTFSRYW | IKEDGSEK | CAREANFWSGYFDYW | QSIDTY | AAS | CQQSYSAPWTF | 1 |
| MS39_p3w30 | GGSFTGYY | IHHRGRT | CARAEDSEIFGVVANTWFDPW | QSVINS | RAS | CQQYNNWPTF | 1 |
| MS39_p3w48 | GDSISSSTYY | IFYTGNT | CASRRITIFGVGELIDWVDPW | SSNIARNY | NNN | CAVWDDSLSGWVF | 1 |
| MS39_p3w5 | GFTFNDYW | IKQDGSEK | CARRRESGSSIYFDYW | RDIRND | AAS | CLQDYSYPYTF | 1 |
| MS39_p3w51 | GDSVSSGTYW | IYYSGST | CARLGVGELSLLGFGTFDIW | QSVSSN | GAS | CQQYNTWPLAF | 1 |
| MS39_p3w8 | GGSISSSSYY | IYNSGNT | CTRPPWAFWSEYYQMGDYYYM | QSITSN | GAS | CQQYNNWPFTF | 1 |
| | | | DVW | | | | |
| MS39_p3w94 | GASISSTDW | VSRSGTS | CAREPYDSWLGYIDVW | QSVLYSPNSKNY | WAS | CQQYFSSPYTF | 1 |
| MS39_p3w97 | GFTFNTYE | ITSSGSTI | CARAAYLHFWSDYPRGWFDPW | QSLLHSNGKTY | EVS | CMQSTQLLGTF | 1 |
| MS9_p11w10 | GFSLSNARMA | IFSNDEK | CARIRVGYNYGPDAFDIW | RGISSY | ATS | CQQLKSYPLTF | 1 |
| MS9_p11w100 | GFTVRNSY | IYNNGNT | CARVEYGNSSGAFDIW | QSVNNN | DAF | CQQYNYWPIFTF | 2 |
| MS9_p11w109 | GFSLSNTKMG | SFSNDEK | CARKSIAVAGRPFDYW | QSISSY | AAS | CQQSYSTPPWTF | 1 |
| MS9_p11w112 | GFSLSNPRMG | IFSNDEK | CARIRVGYNYSPDAFDIW | RGISNY | AAY | CQQLNSYPLTF | 1 |
| MS9_p11w113 | GGSISSSFYY | IYYSGST | CAREEAAASWLEYW | QSVTSN | GAS | CQQYNNWPPLVTF | 1 |
| MS9_p11w115 | GFSFSNYW | IKEDGSQK | CARVQRAAIGYFQYW | QSISTF | AAS | CQQSYSTPSFTF | 1 |
| MS9_p11w118 | GFSLSTGGVG | IYWSDDQ | CARDGTRLRFLEWSLGPTFDI | QSISRW | KAS | CQQYNSYSSTF | 2 |
| | | | W | | | | |
| MS9_p11w13 | GGSISSYDW | ISHSVST | CARYITMVRGVFIQGRGWFDS | QSIGTY | VAS | CQQNYIIRTF | 2 |
| | | | W | | | | |
| MS9_p11w130 | GGYITAYY | VHYTGST | CARDRYCSDNSCPQGRYHFYY | QSISSY | AAS | CQQAYSNSRTF | 1 |
| | | | MDVW | | | | |
| MS9_p11w133 | GFTVSTNY | LYTTGQT | CARVEYGRSSGAFDYW | QSVNSN | DTS | CQQYNYWPKFTF | 1 |
| MS9_p11w14 | GFSLSTSGVG | IYWNDDK | CTHRRRYFDYW | QSVSSY | DAS | CQQRSNWPWTF | 1 |
| MS9_p11w143 | GFTFSNYW | IKQDGGEK | CAKTHSMGGIQWRAQGFDYW | QDISNY | DAS | CQQYDNLPVTF | 2 |
| MS9_p11w144 | GFTFSMYW | IKQDGSEK | CDRPSRPLLPRSAFDIW | QSVSSNY | GAS | CQQYSSSPPPLTF | 1 |
| MS9_p11w145 | GGSISRDY | IYYIGST | CARQPFGGSGWFGWFDTW | QSIDNW | TAS | CQHYNSYPYIF | 1 |
| MS9_p11w159 | NYW | INEDGSEE | CARHRRDFVVVTAGSDLSYNQ | QSINSDY | GAS | CQVYGTSPTFTF | 1 |
| | | | YYYMDVW | | | | |
| MS9_p11w163 | GGSISGYY | IYYSGST | CARSSHDFGDYEAEYFQHW | QSLSSF | GAS | CQQTYSIPWTF | 1 |
| MS9_p11w169 | GDSISGYF | IYYSGIT | CARHVNMAVAGGNWFDPW | HSISSY | GAS | CQQTYSSPPTF | 1 |
| MS9_p11w175 | GGSINTGHYY | IYNSGST | CARAHWRWFAAGPMDVW | QDVNSY | DAS | CQQYDTLPLTF | 12 |
| MS9_p11w176 | GFSLSTSGVG | IYWNDDK | CAHSPPPNDFWSGYYLGGGGD | QSVSSD | GAS | CQQYDHWPTTF | 1 |
| | | | WYFDLW | | | | |
| MS9_p11w20 | RFMFSSYW | IKQDGSEK | CARDRAGFWSAYFDYW | QSISSN | GAF | CQEYNNWPPWTF | 4 |
| MS9_p11w21 | GGSIRRSSYY | IYFSGST | CARDLRGYNYGLDSW | QSLEHNDGNTY | KVS | CMQGTQWPLYTF | 1 |
| MS9_p11w3 | GGSISKSTYY | IYYSGNT | CARDSRAILNSGGLDSW | QSVNSN | GAS | CQHYNDWPLRDTF | 2 |
| MS9_p11w35 | GASI | IYYSGAT | CAKGGNYYDTGSFLWGIRPL | QSISTS | AAS | CQQSYITPRTF | 1 |
| MS9_p11w37 | GFTFSNYG | IWFDESNK | CAREGGYCNHGNCYGMAWFDS | SSDVGSYNL | EVN | CCSYTGRSSWVF | 2 |
| | | | W | | | | |
| MS9_p11w47 | GGSISSSSFF | INYSGTT | CARHWRYSISGSGNWFGPW | SSDVGGYPY | DVT | CCSYAGSSTFVF | 1 |
| MS9_p11w5 | GFSLSTSGMC | IDWDDDK | CARISKMVYYGSESYYFDYW | QSITNY | GAS | CQQSYSIPWTF | 1 |
| MS9_p11w51 | GFTFRSYA | ISGGGGSI | CARYPSGWRLNDAFDIW | QSLVHSDGNTY | KVS | CMQGTHWPPVYTF | 1 |
| MS9_p11w55 | GFSLSNPRMG | IFSNDEK | CARTEVGYGVVIVKPFDIW | QSVSSSY | GAS | CHQYGSSPLTF | 2 |
| MS9_p11w69 | GFSLSNARMG | IFSNDEK | CARTIDTSYYDFWSGSTTGWY | QSVLYSSNKQNY | WAS | CQQYFNSPVTF | 1 |
| | | | FDLW | | | | |
| MS9_p11w7 | GFSLSSSGLC | IDWNDDK | CARILVRGGFDYW | QGIGSW | AAS | CQQANSFPPWTF | 1 |
| MS9_p11w8 | GGSISGYY | IDDSTYT | CGRHQYSWFDLW | QSIDRW | MAS | CQQYDTYPWTF | 1 |
| MS9_p11w81 | GVSISSGRYY | IYYDGST | CARDGRGNSGYDWGYYFDYW | ETISNY | DVS | CQQSYGIPRTF | 1 |
| MS9_p12w106 | GFSFTTSGVG | IYWNDEN | CAHAQRRGRNNWYGSSFDMW | QDISDF | GAS | CQQYDHFLTF | 1 |
| MS9_p12w108 | GFSLSNARMG | IFSNDEK | CARIITPSFYDFWNGYLYYFD | QSFSNN | GVS | CQQYSNWPPTF | 1 |
| | | | YW | | | | |
| MS9_p12w111 | GGSVSNYY | IYTSGNT | CARRGSYTLWSGYPVFDSW | QSLLYSNGYNY | LGS | CMQAVQSPPTF | 1 |
| MS9_p12w112 | GYSFTDYW | IYPGDSET | CARGQLERRHGLYYDILTGSR | KLGDKY | QDT | CQAWDSSTVVF | 1 |
| | | | SLRPKHQNWIDPW | | | | |
| MS9_p12w113 | GGSISSSGHY | IYYSGST | CAKPAMGSIRGWFDPW | QSVYSN | GAS | CQQYNNWPGTF | 1 |
| MS9_p12w114 | GFSFRSYV | ISYDGRNK | CASAQWGCSSTSCYTLDSW | ILRSYY | GKN | CNSRDSNDNHLTVF | 1 |
| MS9_p12w115 | GGSIGSSSDY | ISYGGVT | CASHLPYVYFYYYYMDVW | QSVSSY | DSS | CQQRLNWLTF | 1 |
| MS9_p12w122 | GFSLSTSGMC | IDWDDDK | CARMVRAGYSYYMDVW | QSISSC | AAS | CQQANSFPQTF | 1 |
| MS9_p12w127 | GGFISSSSSY | IYYSGTT | CASAPYYDFWSGYYGDGFDIW | QSLVHSDGKTY | KVS | CMQGTHWPLTF | 1 |
| MS9_p12w13 | GFTFNSYA | ISGSGGDT | CAKLRGYTWNADLDYW | QGIRND | AAS | CLQHNSYPPTF | 1 |
| MS9_p12w130 | GFSLSNARMG | IFSNDEK | CARTIDTSYYDFWSGSTTGWY | QSVLYSSNNKNY | WAS | CQQYFNSPVTF | 1 |
| | | | FDLW | | | | |
| MS9_p12w133 | GFSLSISGVG | IYWNDDK | CAHRPYNFWSAYYFDYW | QSLLHSDGYTY | EVS | CMQDAQDPPFTF | 1 |
| MS9_p12w135 | GFTFNSYA | ISGSGGDT | CAKLRGYTWNADLDYW | SSNIGITT | SNN | CAAWDDRLNGPVF | 1 |
| MS9_p12w14 | GGSITRYY | FYYSGNT | CARHLGVMYAFHIW | QDIGNY | DAS | CQQYDNFPPTF | 2 |
| MS9_p12w145 | GGSISDTTYY | VISSGHT | CARAPYYNFWSGYWFDYW | QGITNW | GAS | CQQANSFLGTF | 1 |
| MS9_p14w183 | GGSISSSDYY | VYYSANT | CGRVRGTVYGVLIKGRPYYYM | QTISKW | RAS | CQHYDNYWWTF | 3 |
| | | | DVW | | | | |
| MS9_p12w153 | GGSISSSSYY | IYYSGST | CARGDIDTGVDSW | QSLVYSDGNTY | KVS | CMQGTHWPPTF | 1 |
| MS9_p12w167 | GGSITTNHYY | ISYSGST | CARETSVMEGFYYYYNMDVW | QSIGRKY | GAS | CQHYGSSPRYTF | 1 |
| MS9_p12w171 | GFSLSNARMA | IVSNDEK | CARLLIGYQFLPYYFDNW | QGISNY | GAS | CQKYNNALLTF | 1 |
| MS9_p12w175 | GFTFSNYW | IKQDGSEK | CARDVRWEGLPDIVVVPAATH | QSVLYSSNNKNY | WAS | CQQYYSTPRTF | 1 |
| | | | EFHMDVW | | | | |
| MS9_p12w177 | GGSISSSTYY | ICCGGST | CARAFTGHPDYDFWRWFDPW | QSVLYSSNNKNY | WAS | CQQYYSNPITF | 2 |
| MS9_p12w18 | RGSISSSTDY | MFHSGAT | CARGRRGDFWTTSFREGSTRL | QGISNW | EAF | CQQANSFPLTF | 1 |
| | | | EYFDYW | | | | |
| MS9_p12w180 | FTFSSYW | INQDGSEK | CARDATSNYVHYYYYMDIW | QSVLYSSDNKNY | WAS | CQQYYSNPRTF | 1 |
| MS9_p12w183 | GGSINSYY | IYNSGST | CARDVEILVNPGHWFDPW | QSISSY | AAS | CQQSYSSLPFTF | 1 |
| MS9_p12w20 | GFSLSNTRMG | IFSTDEK | CARISNYDFWSGSYDAFDIW | HGIRND | AAS | CLQHNSYPPTF | 1 |
| MS9_p12w22 | GFSLTTGGVG | TYWNDDE | CAHSGERCTGGRCYYFNDAFD | QSLLSRSNNKYF | WAS | CQQYYSTVTF | 1 |
| | | | IW | | | | |
| MS9_p12w30 | GGSINSGDHY | IYFSGTT | CARDMSGYYVDSW | QSILYRSNNKNY | WAS | CHQYYSVPRTF | 3 |
| MS9_p12w35 | GGSISSGGYS | IYLSGRT | CARGLCSGTYCPYFDYW | QDINKY | DAS | CQHFHSLPYTF | 1 |
| MS9_p12w37 | GGSISSSPYY | IYYSGST | CARPNDILTGFYAFDLW | QSISSN | GAS | CQRYNNWPPYTF | 3 |
| MS9_p12w44 | GFTFSSYR | ISSSSSYI | CAREMTLSEMWRRSPQYYYYM | QSIGTH | AAS | CQQSYSFPHTF | 7 |
| | | | DVW | | | | |
| MS9_p12w46 | | IKQDGSEK | CARDVRWEGLPDIVVVPAATR | QSVLYSSNNKNY | WAS | CQQYYTPPRTF | 1 |
| | | | DYYMDVW | | | | |
| MS9_p12w48 | GGSFSGSY | INHSGST | CARQNMPSRSLDSW | QSVLYSSNNENY | WAS | CQQYYTTPPTF | 6 |
| MS9_p12w5 | GFTFSDHW | INQDGGEE | CARLVWRVSDYW | QSLVHSDGDTS | GVS | CMQTIHWPWTF | 1 |
| MS9_p12w51 | GYTFTSYA | ISGSGDNT | CANGALRFLEWLYFDYW | QSVSSN | GAS | CQQYNNWPPWTF | 1 |
| MS9_p12w59 | GFMFSNYC | IKHDGSEK | CARDLRPISFLGVDPNYYYLH | QSVRGSY | GAS | CQQYDSSPQTF | 1 |
| | | | MDVW | | | | |
| MS9_p12w62 | RYTFTKYF | INPYNDNT | CVRDPLGIDLRNITIFFVLL* | QSISSW | KAS | CQQYNSYLTF | 1 |
| | | | LL | | | | |
| MS9_p12w92 | GFSLSTSGMC | IDWDDHK | CARVRLSSSGWYVGFADYW | QSFSSY | DAS | CQQRSNWPLTF | 1 |
| MS9_p13w10 | GFTFSSYA | ISDSGVNT | CAKDGTPGHFWSGYLDYW | QSISSW | KAS | CQQYNTYSRTF | 2 |
| MS9_p13w101 | GDSMTGSLYY | IYYSGST | CARAVTRWGFGDRNTWFDPW | QSVSRN | GAF | CQQYNDWPGTF | 1 |
| MS9_p13w111 | GFSFSSFW | INQDGSEK | CARGGEGGIWSGYNLFDYW | QGISDY | AAS | CLQHNTYPGTF | 1 |
| MS9_p13w112 | GGSISNVY | IYNSAST | CAREATGESMLDYW | QYFSTS | | CQQYYDYPLTF | 2 |
| MS9_p13w113 | GFSFTSSW | IDPSDSST | CARLAIYCDGGGCYSTNYNWF | SSNIGSNT | RNS | CASWDDSVNGPSF | 1 |
| | | | GPW | | | | |
| MS9_p13w114 | GFTFSSYW | IKLDGSEK | CASLSYDFWSGYSPPFDYW | QSVSSRY | GAS | CLQYDPSPPWTF | 2 |
| MS9_p13w115 | GFTFSSYQ | ISSSGTTT | CARTEVSGFGVETFDPW | QSISSY | ATT | CQQSFSTLKTF | 1 |
| MS9_p13w118 | GDSISGYF | IYYSGIT | CARHVNMAVAGGNWFDPW | HSISSY | AAS | CQQTYSSPPTF | 1 |
| MS9_p13w119 | GFTFGDYG | IGSSAYDG | CSRGDYDFWSGYRNLFDYW | SSDVGNYDS | TVN | CWSYTSSATCAIR | 1 |
| | | TT | | | | | |
| MS9_p13w127 | GFSLSTSGVG | IYWDDDK | CAHSSPAAMGGGMDVW | KLGDKY | QDS | CQAWDSSTAWVF | 1 |
| MS9_p13w143 | GGSIGSFY | IYYSGSS | CARGTGWNSGCYWGDCFSPPF | QSVSSSY | DAS | CQQYGNSPPVTF | 1 |
| | | | FDIW | | | | |
| MS9_p13w15 | GGSINTGHYY | IYNSWST | CARAHWRWFAAGPMDVW | QSLEHNDGNTY | KVS | CMQGTQWPLYTF | 1 |
| MS9_p13w158 | GGSISSYY | IYYSGST | CARGPYCSGTNCLGFDYW | QSLLHSDGKTY | EVS | CMQGKHLITF | 1 |
| MS9_p13w167 | GGSIRGSSYY | IYFSGST | CARDLRGYSYGLDHW | QSLEHSDGNTY | KVS | CMQGTHWPLYTF | 2 |
| MS9_p13w168 | GGALGSGNYY | ISYSGST | CARDDIVVVPAAISPTYNWFD | QGIRSW | AAS | CQQAHSFPRTF | 1 |
| | | | PW | | | | |
| MS9_p13w171 | GGSISSGSYY | IYFLGST | CASLTFDYSSPYYFDYW | QVISTW | AAS | CQQANSFSALTF | 1 |
| MS9_p13w178 | GGSISNFY | IYNSATT | CAREATGESMLDYW | QYFSTS | | CQQYYDYPLTF | 1 |
| MS9_p13w18 | GFSLTTRGVG | IYWNDDR | CAHTSNHNRRGYYNGAFDYW | QDISNY | DAS | CQQSDHFLSF | 1 |
| MS9_p13w2 | GFTFSSYA | ISGKGDRT | CARDRPDKYRAWGYQYFYGLD | QSVSSN | GAS | CQQYSNWPPGTF | 1 |
| | | | VW | | | | |
| MS9_p13w26 | GFMFSNYW | IKHDGSEK | CARDLRPISFLGVVPNYYYLH | QSVSGSY | GAS | CQQYESSPQTF | 1 |
| | | | MDVW | | | | |
| MS9_p13w3 | GGSISSHY | FYSSGNT | CARHLGVMYAFNIW | QDIGNY | DAS | CQQYDNYPPTF | 1 |
| MS9_p13w39 | GVSISSNSYY | IYYSGST | CAIQKTVTVPFDYW | QDISKY | AAS | CQQYDIVPGAF | 1 |
| MS9_p13w44 | GFTFSNYW | IKQDGSEN | CARDSSSWYYYYYYMDVW | QSVLYSSNNKNY | WAS | CQQYYTTPRTF | 1 |
| MS9_p13w5 | GASISTSSFY | IHSSGSS | CARALDFDMWTPDYLHRSFDY | QSLRSSY | DAS | CQQYASSPLAF | 1 |
| | | | W | | | | |
| MS9_p13w51 | GFSLSTSGMC | IDWDDDK | CARIQEGAATVVGAFDIW | QDITNY | DAF | CQQYDNLPYTF | 1 |
| MS9_p13w55 | GFSFYTRGVG | IYWDGDE | CARRYSAYDSRGHYHYYALDV | QSLLHSDGNTY | EVY | CLQSKQLLTF | 1 |
| | | | W | | | | |
| MS9_p13w58 | RRSISSYDW | ISHSVST | CARYITMVRGVFIQGRGWFDS | QSIGTY | VAS | CQQNYIIRTF | 1 |
| | | | W | | | | |
| MS9_p13w7 | GFSLSISGVG | IYWNDDK | CAHRPYNFWSAYYFDYW | QDISNY | AAS | CQQYNSYPPTF | 2 |
| MS9_p13w8 | GFTFSSFW | IKQDGSEK | CARDSTLLWFGELEDYFDYW | EIISSY | AAS | CQQSYSTPRTF | 1 |
| MS9_p13w89 | GFTFTNYD | TGTAGDA | CTRHLQ*GFLWSEDGHSATVV | QSINSDY | GAS | CQVYGTSPTFTF | 1 |
| | | | TTTTTLWTS | | | | |
| MS9_p14w107 | GGSISSGAFY | IYYSGTT | CAREGYYSSGSYYNVDAFDIW | QSIRTY | ASS | CQQSYNTPRTRTF | 1 |
| MS9_p14w111 | GGSISSYF | IYYSGST | CARHEHCGSPNCYEVGLFDPW | QSIRSY | AAS | CQQSFSTPYTF | 1 |
| MS9_p14w115 | GFMFSSYW | | CARDLRPISFPGVVPKLLLPP | QSVSGSY | GAS | CQQYDSSPQTF | 1 |
| | | | HGRL | | | | |
| MS9_p14w119 | GDSIRSSGSY | IFYSGNT | CARVVSDGDFWSGYWAYW | QIIGSW | RAS | CQQYNSFPYTF | 1 |
| MS9_p14w122 | EFTVSSNY | IYTGGQT | CARVEYGRSSGAFDVW | QSVNNN | DAS | CQQYNYWPKFTF | 1 |
| MS9_p14w126 | GDSISSGDYY | MYYTGSA | CARGADYYGSGGLHW | QSIGGY | AAS | CQQSYSTPYTF | 1 |
| MS9_p14w129 | GGSINNFY | ISYSGST | CARRAGEYLRLWTRTPQNYYY | EDIRNH | AAS | CLQDYNYPLTF | 1 |
| | | | YYMDVW | | | | |
| MS9_p14w130 | GFTFSTYT | ISSSSDYI | CATLGGGYVRNLYDYW | QSVNSY | DAS | CQQRSNWPLTF | 1 |
| MS9_p14w133 | GFSLSTSGMC | IDWDDDK | CARMVREGYSYYMDVW | QSISSW | AAS | CQQANSFPQTF | 1 |
| MS9_p14w135 | GDSVSSSSYY | LYYTGST | CARGHVVGWLRPFDSW | QGVSSN | GAS | CQHYNNWPPITF | 2 |
| MS9_p14w146 | GFTFSDFW | IKQDGSEK | CARDVRWEGLPNIVVLPVPKQ | QSVLYSSNNKNY | WAS | CQQYYSTPRTF | 1 |
| | | | DFYMDVW | | | | |
| MS9_p14w153 | GVSISTYY | IYYSGST | CASSPQVWLPFDYW | QSVSSN | GAS | CQQYNTWIPYTF | 1 |
| MS9_p14w158 | GGSISSSSYY | LYYSGHT | CARDLSGGDAFDIW | QSISSN | GAS | CQQYNKWPRMYTF | 2 |
| MS9_p14w172 | GGSFSGYN | INHSGST | CAKGVVVLPPASNWFDPW | QSISSN | GAS | CQQYNNWPPERTF | 1 |
| MS9_p14w22 | GLTVSDNY | IYTDGST | CARDFYPFWYFDLW | QSLLHSNGYTH | LAS | CMQALQNMYTF | 2 |
| MS9_p14w30 | GGSISNFY | IYNSATT | CAREATGESMLDYW | QYFTTS | | CQQYYDYPLTF | 1 |
| MS9_p14w39 | GYSFTSYL | ISGYNGNT | CARGGSGWYLTSDYW | TGPVTSASS | RTD | CLLDFDGTRVF | 1 |
| MS9_p14w44 | GGSINSSSYY | IYYSGST | CATSLRPLVRGLFSPRYNWFD | QSVLYSSNNKNY | WAS | CQQYYSSPQTF | 1 |
| | | | PW | | | | |
| MS9_p14w47 | GLTFSTAA | VGPSGTST | CAKEGDFWSGYYSGYFDLW | QSISSQ | DAS | CQQRFNWPLFTF | 1 |
| MS9_p14w6 | GGSISSYY | IYYSGVT | CARHIRGGFHMDVW | QSLLHSNGYNY | LGS | CMQALQTPLTF | 1 |
| MS9_p14w8 | GFSVSNARMG | IFSNDEK | CARVEDFGVIIPGFFDYW | QSISTW | KVS | CQQYHSFSWTF | 1 |
| MS9_p14w92 | GFSLSNARMG | IFSNDEK | CARVEDFGVIIPGFFDYW | QSISTW | KAS | CQQYHSFSWTF | 1 |
| MS9_p14w94 | GFSLSDPRMG | IFSKDEK | CARIRVGYNYSPDAFDLW | HDVRND | AAS | CLQHNSYPLTF | 1 |
| MS9_p14w97 | GGSISSYY | IYYSGNT | CARHPFDFWSGDYTEKGYNWF | QDISNY | DAS | CQQYDNLPITF | 2 |
| | | | DPW | | | | |
| MS9_p15w10 | GGSMNSGRYS | IYQSGTI | CARGFGGNGDSSLSRRRNYGM | QGISNY | AAS | CQQLSSYPWTF | 1 |
| | | | DVW | | | | |
| MS9_p15w100 | GFSLSNVRMG | ILSNDEK | CARTTTVFGVEPW | QGIRND | AAS | CLQDYNYPWTF | 1 |
| MS9_p15w104 | GGSISSSSYY | IYYSGST | CARDGIYNWNDAPHVPVMFDS | QSVSSY | DAS | CQQRSNWPPGTF | 1 |
| | | | W | | | | |
| MS9_p15w113 | GASIRRSNYY | VYSSGST | CARDLRGYNYGLDNW | QSLVYSDGNTF | F | CMQASHCV | 1 |
| MS9_p15w114 | GFNLSNNY | IYSDGST | CARELVVLVGATRANDALHFW | QSVLFSPKNKNY | WAS | CQQYYSPRRTF | 1 |
| MS9_p15w126 | GGSISSSDYY | IYFIGIT | CARVGGSSCGYNWNDCGWVDP | QSVSST | GAS | CQQYKNWPYTF | 1 |
| | | | W | | | | |
| MS9_p15w127 | GFSLYTRGVG | IYWDGDK | CARRYSAYDSRGQYHYYAMDV | WSNITNIN | RNN | CVTGDDNLNSQVF | 1 |
| | | | W | | | | |
| MS9_p15w129 | GGSFNTASHY | IYRGST | CARGLPNYDLLTGSSPYNWFD | QSVSSSY | GAS | CQQYGSSPPGITF | 1 |
| | | | PW | | | | |
| MS9_p15w13 | GFTFSSAW | IKTNTDGG | CTTDFSYTSGWNYW | QSLVYSDGDTY | KVS | CMQGTHWPRYTF | 1 |
| | | TT | | | | | |
| MS9_p15w130 | GFSLSTSGLC | IDGDNDK | CARMGVNRGFLGWGGPSRHPY | SSDVGGYNY | EVS | CSSYAGSNFVVF | 1 |
| | | | YYYGLDVW | | | | |
| MS9_p15w135 | GGSISGTNYY | IYYSGQT | CARVAGDIVGVSDATVWFAPW | QSIARN | AAS | CQQGYNTPPTF | 1 |
| MS9_p15w136 | GFTFSSYA | TINNGATT | CAKGIPWEDIVDAFDIW | QGIRND | SAS | CLQHNRYPPIF | 1 |
| MS9_p15w143 | GFTFSSYW | IKEDGSEK | CARGAFFGLGYNWFDPW | QGIGNY | AAS | CQQLTSYPWTF | 1 |
| MS9_p15w145 | GFTFSNYG | ISYDGSNK | CAKDRYYYESSGYYLFDYW | SGSIASNY | EDK | CQSYDNSNKIF | 1 |
| MS9_p15w164 | GFTFDGYA | ITWNSAII | CARAHSYAAWEW | KLGDKY | QDN | CQAWDTSAAWGVF | 1 |
| MS9_p15w169 | GFTFSNYW | IKEDGSEK | CVREVIIGYQWFDPW | QSVRFN | GAS | CQHYNNWPTF | 1 |
| MS9_p15w18 | NYW | IKEDGTEK | CTRPTAVHQLLYRRLPNWFDS | QSVSSY | AAS | CQQSYSTPLYTF | 1 |
| | | | W | | | | |
| MS9_p15w2 | GGSIISTNSY | IYHSGTT | CARALPTIGYCTGGNCYARWW | QSINSN | GAS | CQQYNNWTPHF | 1 |
| | | | FDPW | | | | |
| MS9_p15w20 | GGSISSSNYY | IYYSGST | CARDGAPLRFLEWLQLHWFDP | QDISNY | AAS | CQKYNSAPLTF | 1 |
| | | | W | | | | |
| MS9_p15w22 | | IRSNAYGA | GVRGSALTT | QSISSW | KAS | CQQYNSYSEYTF | 1 |
| | | TR | | | | | |
| MS9_p15w25 | GGSISSSNYY | IYYSGST | CVRPTIRVGWFDPW | QGISNS | AAS | CQQYYSIVPDTF | 1 |
| MS9_p15w3 | GFTFSSYW | IKSDGSET | CARARIVSLPAAIRWGSDTYY | QTISSF | AAS | CQQSYSNTWTF | 1 |
| | | | YYYMDVW | | | | |
| MS9_p15w43 | GFTFTRYW | IKQDGSEK | CATDLWAGSSSIGDYW | QSVYGNY | GAS | CQQYGSSPWTF | 2 |
| MS9_p15w48 | GGSINTYY | IYYTGST | CARDHRCSSTSCQRDYYYYYM | QSITRF | AAS | CQQSYSTPWTF | 1 |
| | | | DVW | | | | |
| MS9_p15w55 | AGAITNNNYY | IYYSGTT | CARTSGGYLADFDSW | SSDVGSYEN | NVN | CCSCASRATNVY | 1 |
| MS9_p15w59 | GFTFINYA | ISGSGGST | CAKAEIYDFWNAYDAFDMW | QSLVHIDGNTY | KVS | CMQGTHWPPTF | 1 |
| MS9_p15w6 | GDSISSTNW | IFRSGST | CARRLWGGSAFDIW | QSLSSY | DGT | CQQRTNWPPLTF | 1 |
| MS9_p15w7 | GDSISNYY | MYYIRNT | CARDRGGFPKGGGGTLSWGRP | QRIGSSY | GAS | CQQYGNSLWTF | 1 |
| | | | SYYSYGMDVW | | | | |
| MS9_p15w83 | GFSLSTGGVG | IYWNDDE | CARDGTRLRFLEWSLGPTLDI | ESIGRW | RAS | CQQYNTYSSTF | 1 |
| | | | W | | | | |
| MS9_p16w10 | GGSITTYY | FYYSGST | CARHLGVMYAFHIW | QDIGNY | DAS | CQQYDNFPPTF | 1 |
| MS9_p16w104 | GDTFNNFA | IIPVFGTI | CVSGRDFDSTYYYGLDVW | SSNIGAGYD | GNS | CQSYDSSLSGVLF | 1 |
| MS9_p16w106 | GFSLSTSGMC | IDWDDHK | CARVRLSSSGWYVGFADYW | QSVSSY | DAS | CQQRSNWPLTF | 1 |
| MS9_p16w109 | GGSIISINYY | IYYSGTT | CARATPQFQQLWQRYEGWDNW | QTINNY | DVS | CQQRGTWPPYTF | 1 |
| | | | FDPW | | | | |
| MS9_p16w112 | GFSLSTTGMC | IDWDDAK | CARIRGSSCLLTGAFGIW | QSVSSNY | GAS | CQQFGGSPG | 1 |
| MS9_p16w115 | GGSISSSSYY | IYYGGTT | CARDISSTYNWLDPW | QDISSW | AAS | CQQANSFPRTF | 1 |
| MS9_p16w127 | GGSISSHY | FYSSGNT | CARHLGVMYAFNIW | QDIGNY | DAS | CQQYDKYPPTF | 1 |
| MS9_p16w133 | GGSISSYY | IYTSGTT | CARDHGFWSGYYFDYW | QSVLYSSNNKNY | WAS | CQQYYSSPLTF | 1 |
| MS9_p16w15 | GYAL | | CARVRISLFRGAKW*GLSTAT | QSVLYSSNSKNY | WAS | CQQYYTTPPTF | 1 |
| | | | VWTS | | | | |
| MS9_p16w159 | GLTVSRNY | IDSAGST | CARGMTVPGTGYYYYYYMDVW | QSLLHKNGYNY | LGS | CMQGLQKFTF | 1 |
| MS9_p16w162 | GFSVTTTY | INRLGST | CARDQTNTWPGDAFDVW | QGITNS | AAS | CQQYYLLPRTF | 1 |
| MS9_p16w168 | GGSISTSSYY | IYYTGST | CARDLTTGTENGFDIW | ESVSSY | DAF | CQQRISWPRTF | 1 |
| MS9_p16w172 | GFTFSSYG | ISYDGSNK | CAKDRQNYGDYGTSPDYW | QDISNY | DAS | CQQYDNLPLTF | 1 |
| MS9_p16w18 | GYSFTSYW | IDPAGSDT | CARHGRYYDSGTYTYW | TGAVTSGHY | DTS | CLLSYSGARPVF | 1 |
| MS9_p16w2 | GASISSYH | IYSNGNT | CATEARCPGDCYAGSFDYW | QSVGSN | GAS | CQQYNNWPQTF | 1 |
| MS9_p16w24 | EFSLSTSGVG | IYWNDDE | CARTTERCTGGRCYNFNDVFD | QSLLYRSNNKNY | WAS | CQQYYTTVTF | 1 |
| | | | IW | | | | |
| MS9_p16w25 | GYSFTGYW | IDPSDSYT | CATRWRGNLRSGDYYYMDVW | SSNIGSNT | VNN | CAAWDDSLNGVVF | 1 |
| MS9_p16w47 | GGSISSYS | IYHSGST | CARQSSMYAGGPEWFDPW | QSVSSF | DAS | CQQRSSWLITF | 1 |
| MS9_p16w48 | GFSLSNPRMA | IFSNDEK | CARIRVGYNYSPDAFDFW | RGISNY | AAY | CQQLNSYPLTF | 1 |
| MS9_p16w59 | GDSVSSNRAA | TYYNSKWYS | CARGSGYWDFDYW | SSDVGGYNY | DVT | CCSYAGGYTFGVF | 1 |
| MS9_p16w6 | STAA | VGPSGTST | CAKEGDFWSGYYSGYFDLW | QSISSQ | DAS | CQQRFNWPLFTF | 1 |
| MS9_p16w8 | GFTFSSYW | INQDGIEK | CARDGAPRWDYYFYMDVW | QSVTSNF | GAS | CHQYGSTPRTF | 1 |
| MS9_p16w83 | GGSISSTFYY | IYYSGNT | CGRDPWATYSDYVTGWFDPW | QSVSSNY | GAS | CQQYGSSPRTF | 1 |
| MS9_p16w93 | | IWYDGGNK | CASQALGERSVVRGVIGRLVM | QSVSSN | GAS | CQQYSNWPPRITF | 1 |
| | | | DVW | | | | |
| MS9_p16w94 | GGSISSSSYY | IHYSGST | CVRPYCSRTSCYGGHAFDIW | QDISNY | DAS | CQQCDNLPHTF | 1 |

The application's sequence listing, which the Patent Office published only in electronic form, follows.

SEQUENCE LISTING (3366 sequences)

SEQ ID NO: 1 - protein, 20 aa, Epstein-Barr Virus
MSDEGPGTGPGNGLGEKGDT

SEQ ID NO: 2 - protein, 20 aa, Epstein-Barr Virus
TGPGNGLGEKGDTSGPEGSG

SEQ ID NO: 3 - protein, 20 aa, Epstein-Barr Virus
GEKGDTSGPEGSGGSGPQRR

SEQ ID NO: 4 - protein, 20 aa, Epstein-Barr Virus
GPEGSGGSGPQRRGGDNHGR

SEQ ID NO: 5 - protein, 20 aa, Epstein-Barr Virus
SGPQRRGGDNHGRGRGRGRG

SEQ ID NO: 6 - protein, 20 aa, Epstein-Barr Virus
GDNHGRGRGRGRGRGGGRPG

SEQ ID NO: 7 - protein, 20 aa, Epstein-Barr Virus
RGRGRGRGGGRPGAPGGSGS

SEQ ID NO: 8 - protein, 20 aa, Epstein-Barr Virus
GGGRPGAPGGSGSGPRHRDG

SEQ ID NO: 9 - protein, 20 aa, Epstein-Barr Virus
PGGSGSGPRHRDGVRRPQKR

SEQ ID NO: 10 - protein, 20 aa, Epstein-Barr Virus
PRHRDGVRRPQKRPSCIGCK

SEQ ID NO: 11 - protein, 20 aa, Epstein-Barr Virus
RRPQKRPSCIGCKGTHGGTG

SEQ ID NO: 12 - protein, 20 aa, Epstein-Barr Virus
SCIGCKGTHGGTGAGAGAGG

SEQ ID NO: 13 - protein, 20 aa, Epstein-Barr Virus
THGGTGAGAGAGGAGAGGAG

SEQ ID NO: 14 - protein, 20 aa, Epstein-Barr Virus
GAGAGGAGAGGAGAGGGAGA

SEQ ID NO: 15 - protein, 20 aa, Epstein-Barr Virus
GAGGAGAGGGAGAGGGAGGA

SEQ ID NO: 16 - protein, 20 aa, Epstein-Barr Virus
GGGAGAGGGAGGAGGAGGAG

SEQ ID NO: 17 - protein, 20 aa, Epstein-Barr Virus
GGAGGAGGAGGAGAGGGAGA

SEQ ID NO: 18 - protein, 20 aa, Epstein-Barr Virus
GGGAGAGGGAGGAGGAGAGG

SEQ ID NO: 19 - protein, 20 aa, Epstein-Barr Virus
GGAGGAGGAGAGGGAGAGGG

SEQ ID NO: 20 - protein, 20 aa, Epstein-Barr Virus
GAGAGGGAGAGGGAGGAGAG

SEQ ID NO: 21 - protein, 20 aa, Epstein-Barr Virus
AGAGGGAGGAGAGGGAGGAG

SEQ ID NO: 22 - protein, 20 aa, Epstein-Barr Virus
GGAGAGGGAGGAGGAGAGGG

SEQ ID NO: 23 - protein, 20 aa, Epstein-Barr Virus
GAGGAGGAGAGGGAGAGGGA

SEQ ID NO: 24 - protein, 20 aa, Epstein-Barr Virus
AGAGGGAGAGGGAGGAGAGG

SEQ ID NO: 25 - protein, 20 aa, Epstein-Barr Virus
GAGGGAGGAGAGGGAGGAGG

SEQ ID NO: 26 - protein, 20 aa, Epstein-Barr Virus
GAGAGGGAGGAGGAGAGGGA

SEQ ID NO: 27 - protein, 20 aa, Epstein-Barr Virus
AGGAGGAGAGGGAGAGGAGG

SEQ ID NO: 28 - protein, 20 aa, Epstein-Barr Virus
GAGGGAGAGGAGGAGGAGAG

SEQ ID NO: 29 - protein, 20 aa, Epstein-Barr Virus
AGGAGGAGGAGAGGAGAGGG

SEQ ID NO: 30 - protein, 20 aa, Epstein-Barr Virus
GGAGAGGAGAGGGAGGAGGA

SEQ ID NO: 31 - protein, 20 aa, Epstein-Barr Virus
AGAGGGAGGAGGAGAGGAGA

SEQ ID NO: 32 - protein, 20 aa, Epstein-Barr Virus
GGAGGAGAGGAGAGGAGAGG

SEQ ID NO: 33 - protein, 20 aa, Epstein-Barr Virus
AGGAGAGGAGAGGAGAGGAG

SEQ ID NO: 34 - protein, 20 aa, Epstein-Barr Virus
GAGAGGAGAGGAGGAGAGGA

SEQ ID NO: 35 - protein, 20 aa, Epstein-Barr Virus
GAGGAGGAGAGGAGGAGAGG

SEQ ID NO: 36 - protein, 20 aa, Epstein-Barr Virus
AGAGGAGGAGAGGAGGAGAG

SEQ ID NO: 37 - protein, 20 aa, Epstein-Barr Virus
GAGAGGAGGAGAGGGAGGAG

SEQ ID NO: 38 - protein, 20 aa, Epstein-Barr Virus
GGAGAGGGAGGAGAGGGAGG

SEQ ID NO: 39 - protein, 20 aa, Epstein-Barr Virus
GAGGAGAGGGAGGAGAGGAG

SEQ ID NO: 40 - protein, 20 aa, Epstein-Barr Virus
GGGAGGAGAGGAGGAGAGGA

SEQ ID NO: 41 - protein, 20 aa, Epstein-Barr Virus
GAGAGGAGGAGAGGGAGAGG

SEQ ID NO: 42 - protein, 20 aa, Epstein-Barr Virus
GGAGAGGGAGAGGAGAGGGG

SEQ ID NO: 43 - protein, 20 aa, Epstein-Barr Virus
GAGAGGAGAGGGGRGRGGSG

SEQ ID NO: 44 - protein, 20 aa, Epstein-Barr Virus
GAGGGGRGRGGSGGRGRGGS

SEQ ID NO: 45 - protein, 20 aa, Epstein-Barr Virus
GRGGSGGRGRGGSGGRGRGG

SEQ ID NO: 46 - protein, 20 aa, Epstein-Barr Virus
RGRGGSGGRGRGGSGGRRGR

SEQ ID NO: 47 - protein, 20 aa, Epstein-Barr Virus
GRGRGGSGGRRGRGRERARG

SEQ ID NO: 48 - protein, 20 aa, Epstein-Barr Virus
GGRRGRGRERARGGSRERAR

SEQ ID NO: 49 - protein, 20 aa, Epstein-Barr Virus
RERARGGSRERARGRGRGRG

SEQ ID NO: 50 - protein, 20 aa, Epstein-Barr Virus
SRERARGRGRGRGEKRPRSP

SEQ ID NO: 51 - protein, 20 aa, Epstein-Barr Virus
RGRGRGEKRPRSPSSQSSSS

SEQ ID NO: 52 - protein, 20 aa, Epstein-Barr Virus
KRPRSPSSQSSSSGSPPRRP

SEQ ID NO: 53 - protein, 20 aa, Epstein-Barr Virus
SQSSSSGSPPRRPPPGRRPF

SEQ ID NO: 54 - protein, 20 aa, Epstein-Barr Virus
SPPRRPPPGRRPFFHPVGEA

SEQ ID NO: 55 - protein, 20 aa, Epstein-Barr Virus
PGRRPFFHPVGEADYFEYHQ

SEQ ID NO: 56 - protein, 20 aa, Epstein-Barr Virus
HPVGEADYFEYHQEGGPDGE

SEQ ID NO: 57 - protein, 20 aa, Epstein-Barr Virus
YFEYHQEGGPDGEPDVPPGA

SEQ ID NO: 58 - protein, 20 aa, Epstein-Barr Virus
GGPDGEPDVPPGAIEQGPAD

SEQ ID NO: 59 - protein, 20 aa, Epstein-Barr Virus
DVPPGAIEQGPADDPGEGPS

SEQ ID NO: 60 - protein, 20 aa, Epstein-Barr Virus
EQGPADDPGEGPSTGPRGQG

SEQ ID NO: 61 - protein, 20 aa, Epstein-Barr Virus
PGEGPSTGPRGQGDGGRRKK

SEQ ID NO: 62 - protein, 20 aa, Epstein-Barr Virus
GPRGQGDGGRRKKGGWFGKH

SEQ ID NO: 63 - protein, 20 aa, Epstein-Barr Virus
GGRRKKGGWFGKHRGQGGSN

SEQ ID NO: 64 - protein, 20 aa, Epstein-Barr Virus
GWFGKHRGQGGSNPKFENIA

SEQ ID NO: 65 - protein, 20 aa, Epstein-Barr Virus
GQGGSNPKFENIAEGLRALL

SEQ ID NO: 66 - protein, 20 aa, Epstein-Barr Virus
KFENIAEGLRALLARSHVER

SEQ ID NO: 67 - protein, 20 aa, Epstein-Barr Virus
GLRALLARSHVERTTDEGTW

SEQ ID NO: 68 - protein, 20 aa, Epstein-Barr Virus
RSHVERTTDEGTWVAGVFVY

SEQ ID NO: 69 - protein, 20 aa, Epstein-Barr Virus
TDEGTWVAGVFVYGGSKTSL

SEQ ID NO: 70 - protein, 20 aa, Epstein-Barr Virus
AGVFVYGGSKTSLYNLRRGT

SEQ ID NO: 71 - protein, 20 aa, Epstein-Barr Virus
GSKTSLYNLRRGTALAIPQC

SEQ ID NO: 72 - protein, 20 aa, Epstein-Barr Virus
NLRRGTALAIPQCRLTPLSR

SEQ ID NO: 73 - protein, 20 aa, Epstein-Barr Virus
LAIPQCRLTPLSRLPFGMAP

SEQ ID NO: 74 - protein, 20 aa, Epstein-Barr Virus
LTPLSRLPFGMAPGPGPQPG

SEQ ID NO: 75 - protein, 20 aa, Epstein-Barr Virus
PFGMAPGPGPQPGPLRESIV

SEQ ID NO: 76 - protein, 20 aa, Epstein-Barr Virus
PGPQPGPLRESIVCYFMVFL

SEQ ID NO: 77 - protein, 20 aa, Epstein-Barr Virus
LRESIVCYFMVFLQTHIFAE

SEQ ID NO: 78 - protein, 20 aa, Epstein-Barr Virus
YFMVFLQTHIFAEVLKDAIK

SEQ ID NO: 79 - protein, 20 aa, Epstein-Barr Virus
THIFAEVLKDAIKDLVMTKP

SEQ ID NO: 80 - protein, 20 aa, Epstein-Barr Virus
LKDAIKDLVMTKPAPTCNIR

SEQ ID NO: 81 - protein, 20 aa, Epstein-Barr Virus
LVMTKPAPTCNIRVTVCSFD

SEQ ID NO: 82 - protein, 20 aa, Epstein-Barr Virus
PTCNIRVTVCSFDDGVDLPP

SEQ ID NO: 83 - protein, 20 aa, Epstein-Barr Virus
TVCSFDDGVDLPPWFPPMVE

SEQ ID NO: 84 - protein, 20 aa, Epstein-Barr Virus
GVDLPPWFPPMVEGAAAEGD

SEQ ID NO: 85 - protein, 20 aa, Epstein-Barr Virus
FPPMVEGAAAEGDDGDDGDE

SEQ ID NO: 86 - protein, 20 aa, Epstein-Barr Virus
AAAEGDDGDDGDEGGDGDEG

SEQ ID NO: 87 - protein, 18 aa, Epstein-Barr Virus
GDDGDEGGDGDEGEEGQE

SEQ ID NO: 88 - protein, 20 aa, Epstein-Barr Virus
LSTMAPGSTVGTLVANMTSV

SEQ ID NO: 89 - protein, 20 aa, Epstein-Barr Virus
ATEDACTKSYSAFLSGMTSL

SEQ ID NO: 90 - protein, 20 aa, Epstein-Barr Virus
SGMTSLLLVLLILLTLAGIL

SEQ ID NO: 91 - protein, 20 aa, Epstein-Barr Virus
LVLLILLTLAGILFIIFVRK

SEQ ID NO: 92 - protein, 20 aa, Epstein-Barr Virus
TLAGILFIIFVRKLVHRMDV

SEQ ID NO: 93 - protein, 20 aa, Epstein-Barr Virus
IIFVRKLVHRMDVWLIALLI

SEQ ID NO: 94 - protein, 20 aa, Epstein-Barr Virus
VHRMDVWLIALLIELLLWVL

SEQ ID NO: 95 - protein, 20 aa, Epstein-Barr Virus
LLLWVLGKMIQEFSSTGLCL

SEQ ID NO: 96 - protein, 20 aa, Epstein-Barr Virus
KMIQEFSSTGLCLLTQNMMF

SEQ ID NO: 97 - protein, 20 aa, Epstein-Barr Virus
STGLCLLTQNMMFLGLMCSV

SEQ ID NO: 98 - protein, 20 aa, Epstein-Barr Virus
TQNMMFLGLMCSVWTHLGMA

SEQ ID NO: 99 - protein, 20 aa, Epstein-Barr Virus
GLMCSVWTHLGMALEKTLAL

SEQ ID NO: 100 - protein, 20 aa, Epstein-Barr Virus
THLGMALEKTLALFSRTPKR

SEQ ID NO: 101 - protein, 20 aa, Epstein-Barr Virus
EKTLALFSRTPKRTSHRNVC

SEQ ID NO: 102 - protein, 20 aa, Epstein-Barr Virus
SRTPKRTSHRNVCLYLMGVF

SEQ ID NO: 103 - protein, 20 aa, Epstein-Barr Virus
ILLITMGPDANLNRGPNMCR

SEQ ID NO: 104 - protein, 20 aa, Epstein-Barr Virus
PDANLNRGPNMCREGPTKGM

SEQ ID NO: 105 - protein, 20 aa, Epstein-Barr Virus
GPNMCREGPTKGMHTAVQGL

SEQ ID NO: 106 - protein, 20 aa, Epstein-Barr Virus
GPTKGMHTAVQGLKAGCYLL

SEQ ID NO: 107 - protein, 20 aa, Epstein-Barr Virus
TVIIIWKLLRTKFGRKPRLI

SEQ ID NO: 108 - protein, 20 aa, Epstein-Barr Virus
LLRTKFGRKPRLICNVTFTG

SEQ ID NO: 109 - protein, 20 aa, Epstein-Barr Virus
RKPRLICNVTFTGLICAFSW

SEQ ID NO: 110 - protein, 20 aa, Epstein-Barr Virus
ICAFSWFMLSLPLLFLGEAG

SEQ ID NO: 111 - protein, 20 aa, Epstein-Barr Virus
MLSLPLLFLGEAGSLGFDCT

SEQ ID NO: 112 - protein, 20 aa, Epstein-Barr Virus
FLGEAGSLGFDCTESLVARY

SEQ ID NO: 113 - protein, 20 aa, Epstein-Barr Virus
LGFDCTESLVARYYPGPAAC

SEQ ID NO: 114 - protein, 20 aa, Epstein-Barr Virus
YAWSFSHFMDSLKNQVTVTA

SEQ ID NO: 115 - protein, 20 aa, Epstein-Barr Virus
FMDSLKNQVTVTARYFRRVP

SEQ ID NO: 116 - protein, 17 aa, Epstein-Barr Virus
QVTVTARYFRRVPSQST

SEQ ID NO: 117 - protein, 20 aa, Epstein-Barr Virus
MEHDLERGPPGPRRPPRGPP

SEQ ID NO: 118 - protein, 20 aa, Epstein-Barr Virus
GPPGPRRPPRGPPLSSSLGL

SEQ ID NO: 119 - protein, 20 aa, Epstein-Barr Virus
LLFWLYIVMSDWTGGALLVL

SEQ ID NO: 120 - protein, 20 aa, Epstein-Barr Virus
VMSDWTGGALLVLYSFALML

SEQ ID NO: 121 - protein, 20 aa, Epstein-Barr Virus
IFRRDLLCPLGALCILLLMI

SEQ ID NO: 122 - protein, 20 aa, Epstein-Barr Virus
ILLLMITLLLIALWNLHGQA

SEQ ID NO: 123 - protein, 20 aa, Epstein-Barr Virus
LGIWIYLLEMLWRLGATIWQ

SEQ ID NO: 124 - protein, 20 aa, Epstein-Barr Virus
LEMLWRLGATIWQLLAFFLA

SEQ ID NO: 125 - protein, 20 aa, Epstein-Barr Virus
IIALYLQQNWWTLLVDLLWL

SEQ ID NO: 126 - protein, 20 aa, Epstein-Barr Virus
VDLLWLLLFLAILIWMYYHG

SEQ ID NO: 127 - protein, 20 aa, Epstein-Barr Virus
LFLAILIWMYYHGQRHSDEH

SEQ ID NO: 128 - protein, 20 aa, Epstein-Barr Virus
WMYYHGQRHSDEHHHDDSLP

SEQ ID NO: 129 - protein, 20 aa, Epstein-Barr Virus
RHSDEHHHDDSLPHPQQATD

SEQ ID NO: 130 - protein, 20 aa, Epstein-Barr Virus
HDDSLPHPQQATDDSGHESD

SEQ ID NO: 131 - protein, 20 aa, Epstein-Barr Virus
PQQATDDSGHESDSNSNEGR

SEQ ID NO: 132 - protein, 20 aa, Epstein-Barr Virus
SGHESDSNSNEGRHHLLVSG

SEQ ID NO: 133 - protein, 20 aa, Epstein-Barr Virus
NSNEGRHHLLVSGAGDGPPL

SEQ ID NO: 134 - protein, 20 aa, Epstein-Barr Virus
HLLVSGAGDGPPLCSQNLGA

SEQ ID NO: 135 - protein, 20 aa, Epstein-Barr Virus
GDGPPLCSQNLGAPGGGPDN

SEQ ID NO: 136 - protein, 20 aa, Epstein-Barr Virus
SQNLGAPGGGPDNGPQDPDN

SEQ ID NO: 137 - protein, 20 aa, Epstein-Barr Virus
GGGPDNGPQDPDNTDDNGPQ

SEQ ID NO: 138 - protein, 20 aa, Epstein-Barr Virus
PQDPDNTDDNGPQDPDNTDD

SEQ ID NO: 139 - protein, 20 aa, Epstein-Barr Virus
DDNGPQDPDNTDDNGPHDPL

SEQ ID NO: 140 - protein, 20 aa, Epstein-Barr Virus
PDNTDDNGPHDPLPQDPDNT

SEQ ID NO: 141 - protein, 20 aa, Epstein-Barr Virus
GPHDPLPQDPDNTDDNGPQD

SEQ ID NO: 142 - protein, 20 aa, Epstein-Barr Virus
DNGPQDPDNTDDNGPHDPLP

SEQ ID NO: 143 - protein, 20 aa, Epstein-Barr Virus
DNTDDNGPHDPLPHSPSDSA

SEQ ID NO: 144 - protein, 20 aa, Epstein-Barr Virus
PHDPLPHSPSDSAGNDGGPP

SEQ ID NO: 145 - protein, 20 aa, Epstein-Barr Virus
SPSDSAGNDGGPPQLTEEVE

SEQ ID NO: 146 - protein, 20 aa, Epstein-Barr Virus
NDGGPPQLTEEVENKGGDQG

SEQ ID NO: 147 - protein, 20 aa, Epstein-Barr Virus
LTEEVENKGGDQGPPLMTDG

SEQ ID NO: 148 - protein, 20 aa, Epstein-Barr Virus
KGGDQGPPLMTDGGGGHSHD

SEQ ID NO: 149 - protein, 20 aa, Epstein-Barr Virus
PLMTDGGGGHSHDSGHGGGD

SEQ ID NO: 150 - protein, 20 aa, Epstein-Barr Virus
GGHSHDSGHGGGDPHLPTLL

SEQ ID NO: 151 - protein, 20 aa, Epstein-Barr Virus
GHGGGDPHLPTLLLGSSGSG

SEQ ID NO: 152 - protein, 20 aa, Epstein-Barr Virus
HLPTLLLGSSGSGGDDDDPH

SEQ ID NO: 153 - protein, 20 aa, Epstein-Barr Virus
GSSGSGGDDDDPHGPVQLSY

SEQ ID NO: 154 - protein, 15 aa, Epstein-Barr Virus
DDDDPHGPVQLSYYD

SEQ ID NO: 155 - protein, 20 aa, Epstein-Barr Virus
MGSLEMVPMGAGPPSPGGDP

SEQ ID NO: 156 - protein, 20 aa, Epstein-Barr Virus
PMGAGPPSPGGDPDGYDGGN

SEQ ID NO: 157 - protein, 20 aa, Epstein-Barr Virus
SPGGDPDGYDGGNNSQYPSA

SEQ ID NO: 158 - protein, 20 aa, Epstein-Barr Virus
GYDGGNNSQYPSASGSSGNT

SEQ ID NO: 159 - protein, 20 aa, Epstein-Barr Virus
SQYPSASGSSGNTPTPPNDE

SEQ ID NO: 160 - protein, 20 aa, Epstein-Barr Virus
GSSGNTPTPPNDEERESNEE

SEQ ID NO: 161 - protein, 20 aa, Epstein-Barr Virus
TPPNDEERESNEEPPPPYED

SEQ ID NO: 162 - protein, 20 aa, Epstein-Barr Virus
RESNEEPPPPYEDPYWGNGD

SEQ ID NO: 163 - protein, 20 aa, Epstein-Barr Virus
PPPYEDPYWGNGDRHSDYQP

SEQ ID NO: 164 - protein, 20 aa, Epstein-Barr Virus
YWGNGDRHSDYQPLGTQDQS

SEQ ID NO: 165 - protein, 20 aa, Epstein-Barr Virus
HSDYQPLGTQDQSLYLGLQH

SEQ ID NO: 166 - protein, 20 aa, Epstein-Barr Virus
GTQDQSLYLGLQHDGNDGLP

SEQ ID NO: 167 - protein, 20 aa, Epstein-Barr Virus
YLGLQHDGNDGLPPPPYSPR

SEQ ID NO: 168 - protein, 20 aa, Epstein-Barr Virus
GNDGLPPPPYSPRDDSSQHI

SEQ ID NO: 169 - protein, 20 aa, Epstein-Barr Virus
PPYSPRDDSSQHIYEEAGRG

SEQ ID NO: 170 - protein, 20 aa, Epstein-Barr Virus
DSSQHIYEEAGRGSMNPVCL

SEQ ID NO: 171 - protein, 20 aa, Epstein-Barr Virus
EEAGRGSMNPVCLPVIVAPY

SEQ ID NO: 172 - protein, 20 aa, Epstein-Barr Virus
MNPVCLPVIVAPYLFWLAAI

SEQ ID NO: 173 - protein, 20 aa, Epstein-Barr Virus
VIVAPYLFWLAAIAASCFTA

SEQ ID NO: 174 - protein, 20 aa, Epstein-Barr Virus
TGLALSLLLLAAVASSYAAA

SEQ ID NO: 175 - protein, 20 aa, Epstein-Barr Virus
LLLAAVASSYAAAQRKLLTP

SEQ ID NO: 176 - protein, 20 aa, Epstein-Barr Virus
SSYAAAQRKLLTPVTVLTAV

SEQ ID NO: 177 - protein, 20 aa, Epstein-Barr Virus
RKLLTPVTVLTAVVTFFAIC

SEQ ID NO: 178 - protein, 20 aa, Epstein-Barr Virus
TFFAICLTWRIEDPPFNSLL

SEQ ID NO: 179 - protein, 20 aa, Epstein-Barr Virus
TWRIEDPPFNSLLFALLAAA

SEQ ID NO: 180 - protein, 20 aa, Epstein-Barr Virus
PFNSLLFALLAAAGGLQGIY

SEQ ID NO: 181 - protein, 20 aa, Epstein-Barr Virus
LVMLVLLILAYRRRWRRLTV

SEQ ID NO: 182 - protein, 20 aa, Epstein-Barr Virus
ILAYRRRWRRLTVCGGIMFL

SEQ ID NO: 183 - protein, 20 aa, Epstein-Barr Virus
DAVLQLSPLLGAVTVVSMTL

SEQ ID NO: 184 - protein, 20 aa, Epstein-Barr Virus
PLLGAVTVVSMTLLLLAFVL

SEQ ID NO: 185 - protein, 20 aa, Epstein-Barr Virus
VVSMTLLLLAFVLWLSSPGG

SEQ ID NO: 186 - protein, 20 aa, Epstein-Barr Virus
LLAFVLWLSSPGGLGTLGAA

SEQ ID NO: 187 - protein, 20 aa, Epstein-Barr Virus
LSSPGGLGTLGAALLTLAAA

SEQ ID NO: 188 - protein, 20 aa, Epstein-Barr Virus
LTLAAALALLASLILGTLNL

SEQ ID NO: 189 - protein, 20 aa, Epstein-Barr Virus
LGTLNLTTMFLLMLLWTLVV

SEQ ID NO: 190 - protein, 20 aa, Epstein-Barr Virus
LWTLVVLLICSSCSSCPLSK

SEQ ID NO: 191 - protein, 20 aa, Epstein-Barr Virus
LICSSCSSCPLSKILLARLF

SEQ ID NO: 192 - protein, 20 aa, Epstein-Barr Virus
SCPLSKILLARLFLYALALL

SEQ ID NO: 193 - protein, 20 aa, Epstein-Barr Virus
LLARLFLYALALLLLASALI

SEQ ID NO: 194 - protein, 20 aa, Epstein-Barr Virus
LASALIAGGSILQTNFKSLS

SEQ ID NO: 195 - protein, 20 aa, Epstein-Barr Virus
GGSILQTNFKSLSSTEFIPN

SEQ ID NO: 196 - protein, 20 aa, Epstein-Barr Virus
NFKSLSSTEFIPNLFCMLLL

SEQ ID NO: 197 - protein, 20 aa, Epstein-Barr Virus
VAGILFILAILTEWGSGNRT

SEQ ID NO: 198 - protein, 20 aa, Epstein-Barr Virus
LAILTEWGSGNRTYGPVFMC

SEQ ID NO: 199 - protein, 20 aa, Epstein-Barr Virus
GSGNRTYGPVFMCLGGLLTM

SEQ ID NO: 200 - protein, 20 aa, Epstein-Barr Virus
GPVFMCLGGLLTMVAGAVWL

SEQ ID NO: 201 - protein, 20 aa, Epstein-Barr Virus
GGLLTMVAGAVWLTVMSNTL

SEQ ID NO: 202 - protein, 20 aa, Epstein-Barr Virus
AGAVWLTVMSNTLLSAWILT

SEQ ID NO: 203 - protein, 20 aa, Epstein-Barr Virus
IRCCRYCCYYCLTLESEERP

SEQ ID NO: 204 - protein, 21 aa, Epstein-Barr Virus
CYYCLTLESEERPPTPYRNTV

SEQ ID NO: 205 - protein, 20 aa, Epstein-Barr Virus
MMDPNSTSEDVKFTPDPYQV

SEQ ID NO: 206 - protein, 20 aa, Epstein-Barr Virus
SEDVKFTPDPYQVPFVQAFD

SEQ ID NO: 207 - protein, 20 aa, Epstein-Barr Virus
PDPYQVPFVQAFDQATRVYQ

SEQ ID NO: 208 - protein, 20 aa, Epstein-Barr Virus
FVQAFDQATRVYQDLGGPSQ

SEQ ID NO: 209 - protein, 20 aa, Epstein-Barr Virus
ATRVYQDLGGPSQAPLPCVL

SEQ ID NO: 210 - protein, 20 aa, Epstein-Barr Virus
LGGPSQAPLPCVLWPVLPEP

SEQ ID NO: 211 - protein, 20 aa, Epstein-Barr Virus
PLPCVLWPVLPEPLPQGQLT

SEQ ID NO: 212 - protein, 20 aa, Epstein-Barr Virus
PVLPEPLPQGQLTAYHVSTA

SEQ ID NO: 213 - protein, 20 aa, Epstein-Barr Virus
PQGQLTAYHVSTAPTGSWFS

SEQ ID NO: 214 - protein, 20 aa, Epstein-Barr Virus
YHVSTAPTGSWFSAPQPAPE

SEQ ID NO: 215 - protein, 20 aa, Epstein-Barr Virus
TGSWFSAPQPAPENAYQAYA

SEQ ID NO: 216 - protein, 20 aa, Epstein-Barr Virus
PQPAPENAYQAYAAPQLFPV

SEQ ID NO: 217 - protein, 20 aa, Epstein-Barr Virus
AYQAYAAPQLFPVSDITQNQ

SEQ ID NO: 218 - protein, 20 aa, Epstein-Barr Virus
PQLFPVSDITQNQQTNQAGG

SEQ ID NO: 219 - protein, 20 aa, Epstein-Barr Virus
DITQNQQTNQAGGEAPQPGD

SEQ ID NO: 220 - protein, 20 aa, Epstein-Barr Virus
TNQAGGEAPQPGDNSTVQTA

SEQ ID NO: 221 - protein, 20 aa, Epstein-Barr Virus
APQPGDNSTVQTAAAVVFAC

SEQ ID NO: 222 - protein, 20 aa, Epstein-Barr Virus
STVQTAAAVVFACPGANQGQ

SEQ ID NO: 223 - protein, 20 aa, Epstein-Barr Virus
AVVFACPGANQGQQLADIGV

SEQ ID NO: 224 - protein, 20 aa, Epstein-Barr Virus
GANQGQQLADIGVPQPAPVA

SEQ ID NO: 225 - protein, 20 aa, Epstein-Barr Virus
LADIGVPQPAPVAAPARRTR

SEQ ID NO: 226 - protein, 20 aa, Epstein-Barr Virus
QPAPVAAPARRTRKPQQPES

SEQ ID NO: 227 - protein, 20 aa, Epstein-Barr Virus
PARRTRKPQQPESLEECDSE

SEQ ID NO: 228 - protein, 20 aa, Epstein-Barr Virus
PQQPESLEECDSELEIKRYK

SEQ ID NO: 229 - protein, 20 aa, Epstein-Barr Virus
EECDSELEIKRYKNRVASRK

SEQ ID NO: 230 - protein, 20 aa, Epstein-Barr Virus
EIKRYKNRVASRKCRAKFKQ

SEQ ID NO: 231 - protein, 20 aa, Epstein-Barr Virus
RVASRKCRAKFKQLLQHYRE

SEQ ID NO: 232 - protein, 20 aa, Epstein-Barr Virus
RAKFKQLLQHYREVAAAKSS

SEQ ID NO: 233 - protein, 20 aa, Epstein-Barr Virus
LQHYREVAAAKSSENDRLRL

SEQ ID NO: 234 - protein, 20 aa, Epstein-Barr Virus
AAAKSSENDRLRLLLKQMCP

SEQ ID NO: 235 - protein, 20 aa, Epstein-Barr Virus
NDRLRLLLKQMCPSLDVDSI

SEQ ID NO: 236 - protein, 20 aa, Epstein-Barr Virus
LKQMCPSLDVDSIIPRTPDV

SEQ ID NO: 237 - protein, 21 aa, Epstein-Barr Virus
LDVDSIIPRTPDVLHEDLLNF

SEQ ID NO: 238 - protein, 10 aa, Artificial sequence
  synthetic sequence
GGSISSGGYY

SEQ ID NO: 239 - protein, 8 aa, Artificial sequence
  synthetic sequence
GFTFSSYA

SEQ ID NO: 240 - protein, 8 aa, Artificial sequence
  synthetic sequence
GFTFSSFG

SEQ ID NO: 241 - protein, 8 aa, Artificial sequence
  synthetic sequence
GGTFSSYT

SEQ ID NO: 242 - protein, 8 aa, Artificial sequence
  synthetic sequence
GGSLSGYY

SEQ ID NO: 243 - protein, 8 aa, Artificial sequence
  synthetic sequence
GYTFTDYY

SEQ ID NO: 244 - protein, 10 aa, Artificial sequence
  synthetic sequence
GDSVSSNSAA

SEQ ID NO: 245 - protein, 8 aa, Artificial sequence
  synthetic sequence
GYTFGSYD

SEQ ID NO: 246 - protein, 8 aa, Artificial sequence
  synthetic sequence
GYTFTSYA

SEQ ID NO: 247 - protein, 8 aa, Artificial sequence
  synthetic sequence
GFTFSSSA

SEQ ID NO: 248 - protein, 8 aa, Artificial sequence
  synthetic sequence
GFTFSTYE

SEQ ID NO: 249 - protein, 8 aa, Artificial sequence
  synthetic sequence
GGSLSTYY

SEQ ID NO: 250 - protein, 9 aa, Artificial sequence
  synthetic sequence
GYSISRAYY

SEQ ID NO: 251 - protein, 8 aa, Artificial sequence
  synthetic sequence
GFTFSSYG

SEQ ID NO: 252 - protein, 8 aa, Artificial sequence
  synthetic sequence
GFTLRHHD

SEQ ID NO: 253 - protein, 10 aa, Artificial sequence
  synthetic sequence
GGSVTSVGHY

SEQ ID NO: 254 - protein, 8 aa, Artificial sequence
  synthetic sequence
GFPFSNYW

SEQ ID NO: 255 - protein, 10 aa, Artificial sequence
  synthetic sequence
GGSISSSSYY

SEQ ID NO: 256 - protein, 8 aa, Artificial sequence
  synthetic sequence
GFTFSAYA

SEQ ID NO: 257 - protein, 8 aa, Artificial sequence
  synthetic sequence
GFTFTNYW

SEQ ID NO: 258 - protein, 8 aa, Artificial sequence
  synthetic sequence
GDSITSYY

SEQ ID NO: 259 - protein, 8 aa, Artificial sequence
  synthetic sequence
GFVFPNYW

SEQ ID NO: 260 - protein, 8 aa, Artificial sequence
  synthetic sequence
GGSISSDY

SEQ ID NO: 261 - protein, 8 aa, Artificial sequence
  synthetic sequence
GGSISGYY

SEQ ID NO: 262 - protein, 10 aa, Artificial sequence
  synthetic sequence
GFSLRTSGMC

SEQ ID NO: 263 - protein, 10 aa, Artificial sequence
  synthetic sequence
GFSLTTNGMC

SEQ ID NO: 264 - protein, 8 aa, Artificial sequence
  synthetic sequence
GGSFSGYY

SEQ ID NO: 265 - protein, 10 aa, Artificial sequence
  synthetic sequence
GGSMVSGGYF

SEQ ID NO: 266 - protein, 10 aa, Artificial sequence
  synthetic sequence
GFSLNTRSVG

SEQ ID NO: 267 - protein, 8 aa, Artificial sequence
  synthetic sequence
GFTVSSNY

SEQ ID NO: 268 - protein, 8 aa, Artificial sequence
  synthetic sequence
GGSISSYY

SEQ ID NO: 269 - protein, 8 aa, Artificial sequence
  synthetic sequence
GFTFSSYW

SEQ ID NO: 270 - protein, 10 aa, Artificial sequence
  synthetic sequence
GGSVNNGGYY

SEQ ID NO: 271 - protein, 10 aa, Artificial sequence
  synthetic sequence
GFSLSNSRMG

SEQ ID NO: 272 - protein, 8 aa, Artificial sequence
  synthetic sequence
GFSFSSYG

SEQ ID NO: 273 - protein, 8 aa, Artificial sequence
  synthetic sequence
DGSFSGYY

SEQ ID NO: 274 - protein, 8 aa, Artificial sequence
  synthetic sequence
GYTFSDFH

SEQ ID NO: 275 - protein, 10 aa, Artificial sequence
  synthetic sequence
GGSVNSGGYY

SEQ ID NO: 276 - protein, 10 aa, Artificial sequence
  synthetic sequence
GGSISSSTYY

SEQ ID NO: 277 - protein, 10 aa, Artificial sequence
  synthetic sequence
GDSISSGDYY

SEQ ID NO: 278 - protein, 10 aa, Artificial sequence
  synthetic sequence
RFSLTTTGVG

SEQ ID NO: 279 - protein, 8 aa, Artificial sequence
  synthetic sequence
GESFSGYY

SEQ ID NO: 280 - protein, 8 aa, Artificial sequence
  synthetic sequence
GGSFSGYF

SEQ ID NO: 281 - protein, 8 aa, Artificial sequence
  synthetic sequence
GYTFTTYG

SEQ ID NO: 282 - protein, 8 aa, Artificial sequence
  synthetic sequence
GVTFRNHG

SEQ ID NO: 283 - protein, 8 aa, Artificial sequence
  synthetic sequence
GFTFQNYG

SEQ ID NO: 284 - protein, 8 aa, Artificial sequence
  synthetic sequence
GFNFGTYV

SEQ ID NO: 285 - protein, 8 aa, Artificial sequence
  synthetic sequence
GFSFRAYA

SEQ ID NO: 286 - protein, 8 aa, Artificial sequence
  synthetic sequence
GFKFDNYG

SEQ ID NO: 287 - protein, 8 aa, Artificial sequence
  synthetic sequence
GFTFSTYT

SEQ ID NO: 288 - protein, 10 aa, Artificial sequence
  synthetic sequence
GDSISSGDYH

SEQ ID NO: 289 - protein, 8 aa, Artificial sequence
  synthetic sequence
GGSFSVYY

SEQ ID NO: 290 - protein, 10 aa, Artificial sequence
  synthetic sequence
GGSISSGDYY

SEQ ID NO: 291 - protein, 8 aa, Artificial sequence
  synthetic sequence
GFTFSRYG

SEQ ID NO: 292 - protein, 8 aa, Artificial sequence
  synthetic sequence
GFTFSSFA

SEQ ID NO: 293 - protein, 8 aa, Artificial sequence
  synthetic sequence
GYTFSDYY

SEQ ID NO: 294 - protein, 8 aa, Artificial sequence
  synthetic sequence
GGSFSGYL

SEQ ID NO: 295 - protein, 8 aa, Artificial sequence
  synthetic sequence
GFTFSNYA

SEQ ID NO: 296 - protein, 6 aa, Artificial sequence
  synthetic sequence
TFSSYG

SEQ ID NO: 297 - protein, 8 aa, Artificial sequence
  synthetic sequence
GYSFADYG

SEQ ID NO: 298 - protein, 8 aa, Artificial sequence
  synthetic sequence
AFIFSSYP

SEQ ID NO: 299 - protein, 8 aa, Artificial sequence
  synthetic sequence
GFIFSTHP

SEQ ID NO: 300 - protein, 7 aa, Artificial sequence
  synthetic sequence
GFTFSNA

SEQ ID NO: 301 - protein, 8 aa, Artificial sequence
  synthetic sequence
GYTFTNYA

SEQ ID NO: 302 - protein, 9 aa, Artificial sequence
  synthetic sequence
GGSIGSSNW

SEQ ID NO: 303 - protein, 8 aa, Artificial sequence
  synthetic sequence
GYTFSDYF

SEQ ID NO: 304 - protein, 8 aa, Artificial sequence
  synthetic sequence
GFAFSSYW

SEQ ID NO: 305 - protein, 8 aa, Artificial sequence
  synthetic sequence
GFIFSDYN

SEQ ID NO: 306 - protein, 10 aa, Artificial sequence
  synthetic sequence
GGSINSGGHY

SEQ ID NO: 307 - protein, 8 aa, Artificial sequence
  synthetic sequence
GGAFRNCG

SEQ ID NO: 308 - protein, 8 aa, Artificial sequence
  synthetic sequence
GFTFVDYA

SEQ ID NO: 309 - protein, 8 aa, Artificial sequence
  synthetic sequence
GGSISTYY

SEQ ID NO: 310 - protein, 8 aa, Artificial sequence
  synthetic sequence
GFIFSSYH

SEQ ID NO: 311 - protein, 10 aa, Artificial sequence
  synthetic sequence
GFSLTTSGVG

SEQ ID NO: 312 - protein, 8 aa, Artificial sequence
  synthetic sequence
SLTLSIDD

SEQ ID NO: 313 - protein, 8 aa, Artificial sequence
  synthetic sequence
GYTFTGYF

SEQ ID NO: 314 - protein, 8 aa, Artificial sequence
  synthetic sequence
GGSISDYY

SEQ ID NO: 315 - protein, 9 aa, Artificial sequence
  synthetic sequence
GGSITSGNW

SEQ ID NO: 316 - protein, 8 aa, Artificial sequence
  synthetic sequence
GLTVSTNY

SEQ ID NO: 317 - protein, 10 aa, Artificial sequence
  synthetic sequence
GGSINSGGYS

SEQ ID NO: 318 - protein, 8 aa, Artificial sequence
  synthetic sequence
GFAFSSFA

SEQ ID NO: 319 - protein, 8 aa, Artificial sequence
  synthetic sequence
GFSFTTYW

SEQ ID NO: 320 - protein, 10 aa, Artificial sequence
  synthetic sequence
GGSISSSGYS

SEQ ID NO: 321 - protein, 10 aa, Artificial sequence
  synthetic sequence
GDSINGAGYY

SEQ ID NO: 322 - protein, 10 aa, Artificial sequence
  synthetic sequence
GDSISGGGYS

SEQ ID NO: 323 - protein, 8 aa, Artificial sequence
  synthetic sequence
RFNFNNYA

SEQ ID NO: 324 - protein, 9 aa, Artificial sequence
  synthetic sequence
GASITSGNW

SEQ ID NO: 325 - protein, 10 aa, Artificial sequence
  synthetic sequence
GGSISSADYY

SEQ ID NO: 326 - protein, 10 aa, Artificial sequence
  synthetic sequence
TGSVSSGGHY

SEQ ID NO: 327 - protein, 8 aa, Artificial sequence
  synthetic sequence
GGTFKKSA

SEQ ID NO: 328 - protein, 8 aa, Artificial sequence
  synthetic sequence
GFTINNYW

SEQ ID NO: 329 - protein, 8 aa, Artificial sequence
  synthetic sequence
GYRFTNYW

SEQ ID NO: 330 - protein, 8 aa, Artificial sequence
  synthetic sequence
GFTFSDYW

SEQ ID NO: 331 - protein, 10 aa, Artificial sequence
  synthetic sequence
GGSIGSGGYY

SEQ ID NO: 332 - protein, 8 aa, Artificial sequence
  synthetic sequence
GYSHTFYW

SEQ ID NO: 333 - protein, 8 aa, Artificial sequence
  synthetic sequence
GYKFTDYH

SEQ ID NO: 334 - protein, 8 aa, Artificial sequence
  synthetic sequence
RYPLTELS

SEQ ID NO: 335 - protein, 10 aa, Artificial sequence
  synthetic sequence
GDSINLYNYY

SEQ ID NO: 336 - protein, 8 aa, Artificial sequence
  synthetic sequence
GFSFSSFA

SEQ ID NO: 337 - protein, 10 aa, Artificial sequence
  synthetic sequence
GGSVSSSIYY

SEQ ID NO: 338 - protein, 8 aa, Artificial sequence
  synthetic sequence
GFIFDDYA

SEQ ID NO: 339 - protein, 10 aa, Artificial sequence
  synthetic sequence
GGSISSSSSY

SEQ ID NO: 340 - protein, 8 aa, Artificial sequence
  synthetic sequence
GLSLSDYT

SEQ ID NO: 341 - protein, 8 aa, Artificial sequence
  synthetic sequence
GDSIRDHY

SEQ ID NO: 342 - protein, 8 aa, Artificial sequence
  synthetic sequence
GFSVSSSY

SEQ ID NO: 343 - protein, 8 aa, Artificial sequence
  synthetic sequence
GYTFTGHH

SEQ ID NO: 344 - protein, 8 aa, Artificial sequence
  synthetic sequence
GFKFDDYG

SEQ ID NO: 345 - protein, 8 aa, Artificial sequence
  synthetic sequence
DYNFADYY

SEQ ID NO: 346 - protein, 8 aa, Artificial sequence
  synthetic sequence
GFTFISSA

SEQ ID NO: 347 - protein, 10 aa, Artificial sequence
  synthetic sequence
GGSINSSSDY

SEQ ID NO: 348 - protein, 8 aa, Artificial sequence
  synthetic sequence
GFTFDDYA

SEQ ID NO: 349 - protein, 8 aa, Artificial sequence
  synthetic sequence
EFTFDDYS

SEQ ID NO: 350 - protein, 8 aa, Artificial sequence
  synthetic sequence
GFTFSRYP

SEQ ID NO: 351 - protein, 10 aa, Artificial sequence
  synthetic sequence
GGSINNYNDY

SEQ ID NO: 352 - protein, 8 aa, Artificial sequence
  synthetic sequence
GFPFSDYG

SEQ ID NO: 353 - protein, 10 aa, Artificial sequence
  synthetic sequence
GDSISSGGYY

SEQ ID NO: 354 - protein, 9 aa, Artificial sequence
  synthetic sequence
AGSTSNNNW

SEQ ID NO: 355 - protein, 10 aa, Artificial sequence
  synthetic sequence
GDSISTTRYY

SEQ ID NO: 356 - protein, 8 aa, Artificial sequence
  synthetic sequence
GFSFNAYW

SEQ ID NO: 357 - protein, 8 aa, Artificial sequence
  synthetic sequence
GFTFSTYV

SEQ ID NO: 358 - protein, 10 aa, Artificial sequence
  synthetic sequence
DDSISSGGYY

SEQ ID NO: 359 - protein, 6 aa, Artificial sequence
  synthetic sequence
TFTSCG

SEQ ID NO: 360 - protein, 8 aa, Artificial sequence
  synthetic sequence
GFVFSTCG

SEQ ID NO: 361 - protein, 8 aa, Artificial sequence
  synthetic sequence
GFMFATYG

SEQ ID NO: 362 - protein, 10 aa, Artificial sequence
  synthetic sequence
GFSLTNHRMG

SEQ ID NO: 363 - protein, 10 aa, Artificial sequence
  synthetic sequence
GGSISSGDFY

SEQ ID NO: 364 - protein, 6 aa, Artificial sequence
  synthetic sequence
TFSTFA

SEQ ID NO: 365 - protein, 8 aa, Artificial sequence
  synthetic sequence
GYTFTGYY

SEQ ID NO: 366 - protein, 8 aa, Artificial sequence
  synthetic sequence
GLTVSGQY

SEQ ID NO: 367 - protein, 9 aa, Artificial sequence
  synthetic sequence
GGSISSSNW

SEQ ID NO: 368 - protein, 8 aa, Artificial sequence
  synthetic sequence
GFTFSTHW

SEQ ID NO: 369 - protein, 8 aa, Artificial sequence
  synthetic sequence
GGSFSDHG

SEQ ID NO: 370 - protein, 8 aa, Artificial sequence
  synthetic sequence
GFTFSDHY

SEQ ID NO: 371 - protein, 8 aa, Artificial sequence
  synthetic sequence
GFGLSDYT

SEQ ID NO: 372 - protein, 10 aa, Artificial sequence
  synthetic sequence
GDSINSGGYY

SEQ ID NO: 373 - protein, 8 aa, Artificial sequence
  synthetic sequence
GFAFNNYA

SEQ ID NO: 374 - protein, 10 aa, Artificial sequence
  synthetic sequence
GDSISSGGYS

SEQ ID NO: 375 - protein, 8 aa, Artificial sequence
  synthetic sequence
GYTFNSYN

SEQ ID NO: 376 - protein, 8 aa, Artificial sequence
  synthetic sequence
GFNFNTHA

SEQ ID NO: 377 - protein, 4 aa, Artificial sequence
  synthetic sequence
SVLP

SEQ ID NO: 378 - protein, 10 aa, Artificial sequence
  synthetic sequence
GASISNGGYY

SEQ ID NO: 379 - protein, 10 aa, Artificial sequence
  synthetic sequence
GDSISSGEYY

SEQ ID NO: 380 - protein, 7 aa, Artificial sequence
  synthetic sequence
FTFSSYW

SEQ ID NO: 381 - protein, 8 aa, Artificial sequence
  synthetic sequence
GYTFISYG

SEQ ID NO: 382 - protein, 8 aa, Artificial sequence
  synthetic sequence
GFTFSGYV

SEQ ID NO: 383 - protein, 10 aa, Artificial sequence
  synthetic sequence
GGSVSSGGHY

SEQ ID NO: 384 - protein, 10 aa, Artificial sequence
  synthetic sequence
GASVSSGGYY

SEQ ID NO: 385 - skipped

SEQ ID NO: 386 - protein, 8 aa, Artificial sequence
  synthetic sequence
GFTFNDYA

SEQ ID NO: 387 - protein, 8 aa, Artificial sequence
  synthetic sequence
GFTFSSYN

SEQ ID NO: 388 - protein, 8 aa, Artificial sequence
  synthetic sequence
GFSFNIYA

SEQ ID NO: 389 - protein, 8 aa, Artificial sequence
  synthetic sequence
GFIFSNSW

SEQ ID NO: 390 - protein, 8 aa, Artificial sequence
  synthetic sequence
GGSISSYH

SEQ ID NO: 391 - protein, 10 aa, Artificial sequence
  synthetic sequence
GVSIGTGTYS

SEQ ID NO: 392 - protein, 8 aa, Artificial sequence
  synthetic sequence
GFTFSRFA

SEQ ID NO: 393 - protein, 10 aa, Artificial sequence
  synthetic sequence
GGSISSRDYY

SEQ ID NO: 394 - protein, 8 aa, Artificial sequence
  synthetic sequence
GFTFSNYG

SEQ ID NO: 395 - protein, 8 aa, Artificial sequence
  synthetic sequence
GHPLTDYY

SEQ ID NO: 396 - protein, 10 aa, Artificial sequence
  synthetic sequence
DDSISRGSFY

SEQ ID NO: 397 - protein, 8 aa, Artificial sequence
  synthetic sequence
GFSFRSYA

SEQ ID NO: 398 - protein, 8 aa, Artificial sequence
  synthetic sequence
GFTFSSHW

SEQ ID NO: 399 - protein, 8 aa, Artificial sequence
  synthetic sequence
GFTFSTYA

SEQ ID NO: 400 - protein, 8 aa, Artificial sequence
  synthetic sequence
GGSIRPYY

SEQ ID NO: 401 - protein, 8 aa, Artificial sequence
  synthetic sequence
GYIFTGYH

SEQ ID NO: 402 - protein, 8 aa, Artificial sequence
  synthetic sequence
GFTFDDYG

SEQ ID NO: 403 - protein, 8 aa, Artificial sequence
  synthetic sequence
GFTFSDFP

SEQ ID NO: 404 - protein, 10 aa, Artificial sequence
  synthetic sequence
GGSISSSNYY

SEQ ID NO: 405 - protein, 8 aa, Artificial sequence
  synthetic sequence
GYTFSNFG

SEQ ID NO: 406 - protein, 8 aa, Artificial sequence
  synthetic sequence
GFTVSNNA

SEQ ID NO: 407 - protein, 8 aa, Artificial sequence
  synthetic sequence
GFTFTTYP

SEQ ID NO: 408 - protein, 10 aa, Artificial sequence
  synthetic sequence
GGSISSGNYY

SEQ ID NO: 409 - protein, 8 aa, Artificial sequence
  synthetic sequence
GFFFKNYW

SEQ ID NO: 410 - protein, 10 aa, Artificial sequence
  synthetic sequence
GGSITSGDYY

SEQ ID NO: 411 - protein, 10 aa, Artificial sequence
  synthetic sequence
GDSVSSGSYY

SEQ ID NO: 412 - protein, 10 aa, Artificial sequence
  synthetic sequence
GVSLRKSRMG

SEQ ID NO: 413 - protein, 10 aa, Artificial sequence
  synthetic sequence
GDSVTSTDYY

SEQ ID NO: 414 - protein, 8 aa, Artificial sequence
  synthetic sequence
GFSFSTYS

SEQ ID NO: 415 - protein, 8 aa, Artificial sequence
  synthetic sequence
GFTFNRYA

SEQ ID NO: 416 - protein, 10 aa, Artificial sequence
  synthetic sequence
GFSLSTSGMC

SEQ ID NO: 417 - protein, 10 aa, Artificial sequence
  synthetic sequence
GGSINTGDYY

SEQ ID NO: 418 - protein, 8 aa, Artificial sequence
  synthetic sequence
GFIFSDYT

SEQ ID NO: 419 - protein, 8 aa, Artificial sequence
  synthetic sequence
GFTVLSSY

SEQ ID NO: 420 - protein, 10 aa, Artificial sequence
  synthetic sequence
GDSVSSNSAS

SEQ ID NO: 421 - protein, 10 aa, Artificial sequence
  synthetic sequence
GGSISSNNYF

SEQ ID NO: 422 - protein, 8 aa, Artificial sequence
  synthetic sequence
GFSFRGYV

SEQ ID NO: 423 - protein, 6 aa, Artificial sequence
  synthetic sequence
SFSSFA

SEQ ID NO: 424 - protein, 10 aa, Artificial sequence
  synthetic sequence
GGSVNSRTYY

SEQ ID NO: 425 - protein, 10 aa, Artificial sequence
  synthetic sequence
GDSISSNHYY

SEQ ID NO: 426 - protein, 10 aa, Artificial sequence
  synthetic sequence
GFSLDNPRMG

SEQ ID NO: 427 - protein, 8 aa, Artificial sequence
  synthetic sequence
GGSISNFY

SEQ ID NO: 428 - skipped

SEQ ID NO: 429 - protein, 10 aa, Artificial sequence
  synthetic sequence
GLSLSTGGMC

SEQ ID NO: 430 - protein, 9 aa, Artificial sequence
  synthetic sequence
GGPISSSNW

SEQ ID NO: 431 - protein, 8 aa, Artificial sequence
  synthetic sequence
GYRFTSHW

SEQ ID NO: 432 - protein, 8 aa, Artificial sequence
  synthetic sequence
GDSMSGYH

SEQ ID NO: 433 - protein, 10 aa, Artificial sequence
  synthetic sequence
GFSLSTPEMR

SEQ ID NO: 434 - protein, 8 aa, Artificial sequence
  synthetic sequence
GGSFTDYT

SEQ ID NO: 435 - protein, 9 aa, Artificial sequence
  synthetic sequence
GYSITGSYY

SEQ ID NO: 436 - protein, 10 aa, Artificial sequence
  synthetic sequence
GFSLSNARLG

SEQ ID NO: 437 - protein, 10 aa, Artificial sequence
  synthetic sequence
GDSVSSTDHS

SEQ ID NO: 438 - protein, 8 aa, Artificial sequence
  synthetic sequence
GYTFTSYH

SEQ ID NO: 439 - protein, 10 aa, Artificial sequence
  synthetic sequence
GGSIDISGYY

SEQ ID NO: 440 - protein, 8 aa, Artificial sequence
  synthetic sequence
GYIFGTYW

SEQ ID NO: 441 - protein, 8 aa, Artificial sequence
  synthetic sequence
GGSVSAYY

SEQ ID NO: 442 - protein, 8 aa, Artificial sequence
  synthetic sequence
GSSISNYY

SEQ ID NO: 443 - protein, 8 aa, Artificial sequence
  synthetic sequence
GDSITTYY

SEQ ID NO: 444 - protein, 8 aa, Artificial sequence
  synthetic sequence
GGTFSSYA

SEQ ID NO: 445 - protein, 10 aa, Artificial sequence
  synthetic sequence
GDSVNSRRYY

SEQ ID NO: 446 - protein, 8 aa, Artificial sequence
  synthetic sequence
GFTFISVW

SEQ ID NO: 447 - protein, 8 aa, Artificial sequence
  synthetic sequence
GGTFSRYT

SEQ ID NO: 448 - protein, 8 aa, Artificial sequence
  synthetic sequence
RFTFSNYA

SEQ ID NO: 449 - protein, 8 aa, Artificial sequence
  synthetic sequence
GGSVSAYS

SEQ ID NO: 450 - protein, 8 aa, Artificial sequence
  synthetic sequence
GYSFTSYW

SEQ ID NO: 451 - protein, 8 aa, Artificial sequence
  synthetic sequence
GFSFDDYT

SEQ ID NO: 452 - protein, 8 aa, Artificial sequence
  synthetic sequence
GFTFTTYW

SEQ ID NO: 453 - protein, 8 aa, Artificial sequence
  synthetic sequence
GFIFSSSV

SEQ ID NO: 454 - protein, 8 aa, Artificial sequence
  synthetic sequence
GCDVSAYG

SEQ ID NO: 455 - protein, 10 aa, Artificial sequence
  synthetic sequence
GFSLSTPELR

SEQ ID NO: 456 - protein, 10 aa, Artificial sequence
  synthetic sequence
GFSLRSSGVG

SEQ ID NO: 457 - protein, 8 aa, Artificial sequence
  synthetic sequence
GYNFAEFW

SEQ ID NO: 458 - protein, 4 aa, Artificial sequence
  synthetic sequence
SGSA

SEQ ID NO: 459 - protein, 8 aa, Artificial sequence
  synthetic sequence
GYTFNNSA

SEQ ID NO: 460 - protein, 8 aa, Artificial sequence
  synthetic sequence
GYTFSTYG

SEQ ID NO: 461 - protein, 8 aa, Artificial sequence
  synthetic sequence
GFTFNTYA

SEQ ID NO: 462 - protein, 8 aa, Artificial sequence
  synthetic sequence
GHTFTNHA

SEQ ID NO: 463 - protein, 8 aa, Artificial sequence
  synthetic sequence
GFPFSNFA

SEQ ID NO: 464 - protein, 8 aa, Artificial sequence
  synthetic sequence
GYNFAKYW

SEQ ID NO: 465 - protein, 8 aa, Artificial sequence
  synthetic sequence
GFTFRIFA

SEQ ID NO: 466 - protein, 10 aa, Artificial sequence
  synthetic sequence
GFSLTSSGVG

SEQ ID NO: 467 - protein, 8 aa, Artificial sequence
  synthetic sequence
GFKCRDYG

SEQ ID NO: 468 - protein, 10 aa, Artificial sequence
  synthetic sequence
GASVSSNTVG

SEQ ID NO: 469 - protein, 8 aa, Artificial sequence
  synthetic sequence
GYTFTSFD

SEQ ID NO: 470 - protein, 8 aa, Artificial sequence
  synthetic sequence
GFTFSRYW

SEQ ID NO: 471 - protein, 10 aa, Artificial sequence
  synthetic sequence
GGSVSSSSHY

SEQ ID NO: 472 - protein, 10 aa, Artificial sequence
  synthetic sequence
GFSLSSPTMG

SEQ ID NO: 473 - protein, 8 aa, Artificial sequence
  synthetic sequence
GFIFSSYA

SEQ ID NO: 474 - protein, 8 aa, Artificial sequence
  synthetic sequence
GGSFNGYS

SEQ ID NO: 475 - protein, 10 aa, Artificial sequence
  synthetic sequence
DVSVSSGAYY

SEQ ID NO: 476 - protein, 10 aa, Artificial sequence
  synthetic sequence
RFSLSTTGVN

SEQ ID NO: 477 - protein, 10 aa, Artificial sequence
  synthetic sequence
GGSISSDDYY

SEQ ID NO: 478 - protein, 10 aa, Artificial sequence
  synthetic sequence
GDSVRNNNLY

SEQ ID NO: 479 - protein, 8 aa, Artificial sequence
  synthetic sequence
GFAFGSYS

SEQ ID NO: 480 - protein, 6 aa, Artificial sequence
  synthetic sequence
SFSTYG

SEQ ID NO: 481 - protein, 10 aa, Artificial sequence
  synthetic sequence
GFSLSTTGVN

SEQ ID NO: 482 - protein, 8 aa, Artificial sequence
  synthetic sequence
GITFNPYA

SEQ ID NO: 483 - protein, 8 aa, Artificial sequence
  synthetic sequence
GYTFTTYY

SEQ ID NO: 484 - protein, 8 aa, Artificial sequence
  synthetic sequence
GITVRSYA

SEQ ID NO: 485 - protein, 8 aa, Artificial sequence
  synthetic sequence
GYTFTDYL

SEQ ID NO: 486 - protein, 8 aa, Artificial sequence
  synthetic sequence
GCTFRSSA

SEQ ID NO: 487 - protein, 8 aa, Artificial sequence
  synthetic sequence
GFTFSNYW

SEQ ID NO: 488 - protein, 8 aa, Artificial sequence
  synthetic sequence
GITFNTYA

SEQ ID NO: 489 - protein, 8 aa, Artificial sequence
  synthetic sequence
GYRFTNYD

SEQ ID NO: 490 - protein, 8 aa, Artificial sequence
  synthetic sequence
GGTFSDYG

SEQ ID NO: 491 - protein, 8 aa, Artificial sequence
  synthetic sequence
GGSFSGDY

SEQ ID NO: 492 - protein, 8 aa, Artificial sequence
  synthetic sequence
GYSFTGYY

SEQ ID NO: 493 - protein, 9 aa, Artificial sequence
  synthetic sequence
GVSISSNKY

SEQ ID NO: 494 - protein, 8 aa, Artificial sequence
  synthetic sequence
GFTFRSYA

SEQ ID NO: 495 - protein, 10 aa, Artificial sequence
  synthetic sequence
GGSISSGAYY

SEQ ID NO: 496 - protein, 8 aa, Artificial sequence
  synthetic sequence
GFTLRRYG

SEQ ID NO: 497 - protein, 8 aa, Artificial sequence
  synthetic sequence
GFTFSSHD

SEQ ID NO: 498 - protein, 8 aa, Artificial sequence
  synthetic sequence
GLIVSNNY

SEQ ID NO: 499 - protein, 8 aa, Artificial sequence
  synthetic sequence
VESFSDYY

SEQ ID NO: 500 - protein, 8 aa, Artificial sequence
  synthetic sequence
GYIFTNYW

SEQ ID NO: 501 - protein, 8 aa, Artificial sequence
  synthetic sequence
GGTFNSFS

SEQ ID NO: 502 - protein, 8 aa, Artificial sequence
  synthetic sequence
GFTFSGSW

SEQ ID NO: 503 - protein, 10 aa, Artificial sequence
  synthetic sequence
GDSISSAGYY

SEQ ID NO: 504 - protein, 7 aa, Artificial sequence
  synthetic sequence
YTFSSYG

SEQ ID NO: 505 - protein, 8 aa, Artificial sequence
  synthetic sequence
GGALSTYA

SEQ ID NO: 506 - protein, 8 aa, Artificial sequence
  synthetic sequence
GYTFSSYG

SEQ ID NO: 507 - protein, 9 aa, Artificial sequence
  synthetic sequence
GVSITSANW

SEQ ID NO: 508 - protein, 8 aa, Artificial sequence
  synthetic sequence
GFTFSNAW

SEQ ID NO: 509 - protein, 9 aa, Artificial sequence
  synthetic sequence
FSLSDFGEG

SEQ ID NO: 510 - protein, 7 aa, Artificial sequence
  synthetic sequence
YNFTTYW

SEQ ID NO: 511 - protein, 8 aa, Artificial sequence
  synthetic sequence
VLTFPTFG

SEQ ID NO: 512 - protein, 8 aa, Artificial sequence
  synthetic sequence
GFTFSSHT

SEQ ID NO: 513 - protein, 10 aa, Artificial sequence
  synthetic sequence
GFSLNNARMG

SEQ ID NO: 514 - protein, 10 aa, Artificial sequence
  synthetic sequence
GGSVTSGGYF

SEQ ID NO: 515 - protein, 10 aa, Artificial sequence
  synthetic sequence
NGSIISTVYH

SEQ ID NO: 516 - protein, 8 aa, Artificial sequence
  synthetic sequence
GFALSSSA

SEQ ID NO: 517 - protein, 10 aa, Artificial sequence
  synthetic sequence
GVSVNSADSN

SEQ ID NO: 518 - protein, 8 aa, Artificial sequence
  synthetic sequence
GYTLTELS

SEQ ID NO: 519 - protein, 10 aa, Artificial sequence
  synthetic sequence
YGSIRSHSYF

SEQ ID NO: 520 - protein, 8 aa, Artificial sequence
  synthetic sequence
GYTFTSYG

SEQ ID NO: 521 - protein, 8 aa, Artificial sequence
  synthetic sequence
GYSFTTYA

SEQ ID NO: 522 - protein, 10 aa, Artificial sequence
  synthetic sequence
GFSLNNARVG

SEQ ID NO: 523 - protein, 8 aa, Artificial sequence
  synthetic sequence
GFTFGTYT

SEQ ID NO: 524 - protein, 8 aa, Artificial sequence
  synthetic sequence
GFSFNSYG

SEQ ID NO: 525 - protein, 8 aa, Artificial sequence
  synthetic sequence
GGSFTGYY

SEQ ID NO: 526 - protein, 4 aa, Artificial sequence
  synthetic sequence
HTCA

SEQ ID NO: 527 - protein, 8 aa, Artificial sequence
  synthetic sequence
LASFSDYY

SEQ ID NO: 528 - protein, 8 aa, Artificial sequence
  synthetic sequence
GGTFSSYG

SEQ ID NO: 529 - protein, 6 aa, Artificial sequence
  synthetic sequence
TFSNYW

SEQ ID NO: 530 - protein, 8 aa, Artificial sequence
  synthetic sequence
GGSVTSHF

SEQ ID NO: 531 - protein, 5 aa, Artificial sequence
  synthetic sequence
SNSAS

SEQ ID NO: 532 - protein, 8 aa, Artificial sequence
  synthetic sequence
GFTFGDYA

SEQ ID NO: 533 - protein, 10 aa, Artificial sequence
  synthetic sequence
GGSINTNSYY

SEQ ID NO: 534 - protein, 8 aa, Artificial sequence
  synthetic sequence
GFTFLPFS

SEQ ID NO: 535 - protein, 10 aa, Artificial sequence
  synthetic sequence
GGSIISNYYY

SEQ ID NO: 536 - protein, 8 aa, Artificial sequence
  synthetic sequence
GGSFSRYY

SEQ ID NO: 537 - protein, 8 aa, Artificial sequence
  synthetic sequence
GYTLRSYG

SEQ ID NO: 538 - protein, 8 aa, Artificial sequence
  synthetic sequence
GGSFSWYY

SEQ ID NO: 539 - protein, 8 aa, Artificial sequence
  synthetic sequence
GFTFSKNG

SEQ ID NO: 540 - protein, 10 aa, Artificial sequence
  synthetic sequence
GGSLSESLYS

SEQ ID NO: 541 - protein, 9 aa, Artificial sequence
  synthetic sequence
GYSISSNNW

SEQ ID NO: 542 - protein, 10 aa, Artificial sequence
  synthetic sequence
GVSITTNSSY

SEQ ID NO: 543 - protein, 8 aa, Artificial sequence
  synthetic sequence
GFTFRTYA

SEQ ID NO: 544 - protein, 8 aa, Artificial sequence
  synthetic sequence
GFTFGSYS

SEQ ID NO: 545 - protein, 8 aa, Artificial sequence
  synthetic sequence
NYTFTCQG

SEQ ID NO: 546 - protein, 8 aa, Artificial sequence
  synthetic sequence
GYSFSDFG

SEQ ID NO: 547 - protein, 10 aa, Artificial sequence
  synthetic sequence
GGSVSSDNYY

SEQ ID NO: 548 - protein, 8 aa, Artificial sequence
  synthetic sequence
GYSFATHW

SEQ ID NO: 549 - protein, 10 aa, Artificial sequence
  synthetic sequence
GGSISRDNYY

SEQ ID NO: 550 - protein, 8 aa, Artificial sequence
  synthetic sequence
GFTLSDHF

SEQ ID NO: 551 - protein, 8 aa, Artificial sequence
  synthetic sequence
GFPFSAFY

SEQ ID NO: 552 - protein, 8 aa, Artificial sequence
  synthetic sequence
GGTFSNYA

SEQ ID NO: 553 - protein, 8 aa, Artificial sequence
  synthetic sequence
GFTFRNFA

SEQ ID NO: 554 - protein, 8 aa, Artificial sequence
  synthetic sequence
GYSLRTHW

SEQ ID NO: 555 - protein, 8 aa, Artificial sequence
  synthetic sequence
GFTFSMFG

SEQ ID NO: 556 - protein, 8 aa, Artificial sequence
  synthetic sequence
NYTFTGYG

SEQ ID NO: 557 - protein, 8 aa, Artificial sequence
  synthetic sequence
GYSFSTYW

SEQ ID NO: 558 - protein, 8 aa, Artificial sequence
  synthetic sequence
GFTFSGSA

SEQ ID NO: 559 - protein, 8 aa, Artificial sequence
  synthetic sequence
VFTFSSYW

SEQ ID NO: 560 - protein, 8 aa, Artificial sequence
  synthetic sequence
GFTFRSYW

SEQ ID NO: 561 - protein, 10 aa, Artificial sequence
  synthetic sequence
GGSISSRNFF

SEQ ID NO: 562 - protein, 8 aa, Artificial sequence
  synthetic sequence
GGSFSDSY

SEQ ID NO: 563 - protein, 8 aa, Artificial sequence
  synthetic sequence
GFTFSNNV

SEQ ID NO: 564 - protein, 6 aa, Artificial sequence
  synthetic sequence
TFSSYE

SEQ ID NO: 565 - protein, 8 aa, Artificial sequence
  synthetic sequence
GFPFSTYS

SEQ ID NO: 566 - protein, 8 aa, Artificial sequence
  synthetic sequence
GGSISSFY

SEQ ID NO: 567 - protein, 8 aa, Artificial sequence
  synthetic sequence
GFTFSRFS

SEQ ID NO: 568 - protein, 8 aa, Artificial sequence
  synthetic sequence
GFTFNSYE

SEQ ID NO: 569 - protein, 7 aa, Artificial sequence
  synthetic sequence
AYKLTLG

SEQ ID NO: 570 - protein, 8 aa, Artificial sequence
  synthetic sequence
GYTFTDYF

SEQ ID NO: 571 - protein, 5 aa, Artificial sequence
  synthetic sequence
SNSAA

SEQ ID NO: 572 - protein, 8 aa, Artificial sequence
  synthetic sequence
STRSRRCF

SEQ ID NO: 573 - protein, 8 aa, Artificial sequence
  synthetic sequence
GFTFSTYG

SEQ ID NO: 574 - protein, 10 aa, Artificial sequence
  synthetic sequence
GGPISRGGYY

SEQ ID NO: 575 - protein, 8 aa, Artificial sequence
  synthetic sequence
GYTFTHYG

SEQ ID NO: 576 - protein, 8 aa, Artificial sequence
  synthetic sequence
GHTFTDYY

SEQ ID NO: 577 - protein, 8 aa, Artificial sequence
  synthetic sequence
AFSFSSYG

SEQ ID NO: 578 - protein, 8 aa, Artificial sequence
  synthetic sequence
GFTFSSYS

SEQ ID NO: 579 - protein, 8 aa, Artificial sequence
  synthetic sequence
GFTFSSFW

SEQ ID NO: 580 - protein, 8 aa, Artificial sequence
  synthetic sequence
GGSISGYS

SEQ ID NO: 581 - protein, 8 aa, Artificial sequence
  synthetic sequence
GSPFTGYY

SEQ ID NO: 582 - protein, 10 aa, Artificial sequence
  synthetic sequence
SGSVRSSHYY

SEQ ID NO: 583 - protein, 8 aa, Artificial sequence
  synthetic sequence
GFILSTYA

SEQ ID NO: 584 - protein, 8 aa, Artificial sequence
  synthetic sequence
GFIFSSYG

SEQ ID NO: 585 - protein, 8 aa, Artificial sequence
  synthetic sequence
GFTFTDYA

SEQ ID NO: 586 - protein, 8 aa, Artificial sequence
  synthetic sequence
GITFSRDG

SEQ ID NO: 587 - protein, 8 aa, Artificial sequence
  synthetic sequence
GFMFSSYG

SEQ ID NO: 588 - protein, 8 aa, Artificial sequence
  synthetic sequence
GGSTSSFY

SEQ ID NO: 589 - protein, 8 aa, Artificial sequence
  synthetic sequence
GYTFTDNY

SEQ ID NO: 590 - protein, 8 aa, Artificial sequence
  synthetic sequence
GYTFTGFY

SEQ ID NO: 591 - protein, 8 aa, Artificial sequence
  synthetic sequence
GFMFSDYP

SEQ ID NO: 592 - protein, 6 aa, Artificial sequence
  synthetic sequence
TFSRFS

SEQ ID NO: 593 - protein, 8 aa, Artificial sequence
  synthetic sequence
GYTFTDFY

SEQ ID NO: 594 - protein, 8 aa, Artificial sequence
  synthetic sequence
GFPFSNYA

SEQ ID NO: 595 - protein, 8 aa, Artificial sequence
  synthetic sequence
VCSISSFY

SEQ ID NO: 596 - protein, 8 aa, Artificial sequence
  synthetic sequence
GDSISNYH

SEQ ID NO: 597 - protein, 8 aa, Artificial sequence
  synthetic sequence
GLTFYSFA

SEQ ID NO: 598 - protein, 8 aa, Artificial sequence
  synthetic sequence
GCLCTLHF

SEQ ID NO: 599 - protein, 10 aa, Artificial sequence
  synthetic sequence
GDSISRTTYY

SEQ ID NO: 600 - protein, 8 aa, Artificial sequence
  synthetic sequence
GFTFSSYP

SEQ ID NO: 601 - protein, 8 aa, Artificial sequence
  synthetic sequence
GFPFSAYS

SEQ ID NO: 602 - protein, 8 aa, Artificial sequence
  synthetic sequence
GYTFAAYH

SEQ ID NO: 603 - protein, 10 aa, Artificial sequence
  synthetic sequence
GSSITNGDSY

SEQ ID NO: 604 - protein, 8 aa, Artificial sequence
  synthetic sequence
GFIFNNYA

SEQ ID NO: 605 - protein, 10 aa, Artificial sequence
  synthetic sequence
GGAISSSSFY

SEQ ID NO: 606 - protein, 8 aa, Artificial sequence
  synthetic sequence
GFSFDDYA

SEQ ID NO: 607 - protein, 8 aa, Artificial sequence
  synthetic sequence
GGPMTRHY

SEQ ID NO: 608 - protein, 8 aa, Artificial sequence
  synthetic sequence
GFPFTNYA

SEQ ID NO: 609 - protein, 8 aa, Artificial sequence
  synthetic sequence
GFTFNNYA

SEQ ID NO: 610 - protein, 8 aa, Artificial sequence
  synthetic sequence
GFTFDNYA

SEQ ID NO: 611 - protein, 8 aa, Artificial sequence
  synthetic sequence
GFPFTNSA

SEQ ID NO: 612 - protein, 8 aa, Artificial sequence
  synthetic sequence
GYSFTSYG

SEQ ID NO: 613 - protein, 10 aa, Artificial sequence
  synthetic sequence
GFSLGSSGVG

SEQ ID NO: 614 - protein, 7 aa, Artificial sequence
  synthetic sequence
YNFRTYW

SEQ ID NO: 615 - protein, 8 aa, Artificial sequence
  synthetic sequence
GFPFTDYA

SEQ ID NO: 616 - protein, 8 aa, Artificial sequence
  synthetic sequence
GESFRGYY

SEQ ID NO: 617 - protein, 8 aa, Artificial sequence
  synthetic sequence
GCTFGNYA

SEQ ID NO: 618 - protein, 8 aa, Artificial sequence
  synthetic sequence
DGSFNTNY

SEQ ID NO: 619 - protein, 10 aa, Artificial sequence
  synthetic sequence
GFPLGRSGVG

SEQ ID NO: 620 - protein, 8 aa, Artificial sequence
  synthetic sequence
GYSFTAYW

SEQ ID NO: 621 - protein, 8 aa, Artificial sequence
  synthetic sequence
GEPLTGDY

SEQ ID NO: 622 - protein, 6 aa, Artificial sequence
  synthetic sequence
TFSTYS

SEQ ID NO: 623 - protein, 8 aa, Artificial sequence
  synthetic sequence
GGSITSHY

SEQ ID NO: 624 - protein, 8 aa, Artificial sequence
  synthetic sequence
GFTFDIYW

SEQ ID NO: 625 - protein, 8 aa, Artificial sequence
  synthetic sequence
TFTVSDFY

SEQ ID NO: 626 - protein, 10 aa, Artificial sequence
  synthetic sequence
VFSLGSSGVG

SEQ ID NO: 627 - protein, 8 aa, Artificial sequence
  synthetic sequence
GGSISNYY

SEQ ID NO: 628 - protein, 8 aa, Artificial sequence
  synthetic sequence
GFTFSIYG

SEQ ID NO: 629 - protein, 10 aa, Artificial sequence
  synthetic sequence
GGPISTSSYY

SEQ ID NO: 630 - protein, 10 aa, Artificial sequence
  synthetic sequence
GDSVSSNSVA

SEQ ID NO: 631 - protein, 10 aa, Artificial sequence
  synthetic sequence
AFPLGRRGVG

SEQ ID NO: 632 - protein, 8 aa, Artificial sequence
  synthetic sequence
GYTFTTFG

SEQ ID NO: 633 - protein, 8 aa, Artificial sequence
  synthetic sequence
GYTFTGHY

SEQ ID NO: 634 - protein, 8 aa, Artificial sequence
  synthetic sequence
GASFSGYY

SEQ ID NO: 635 - protein, 8 aa, Artificial sequence
  synthetic sequence
GYTFNSYG

SEQ ID NO: 636 - protein, 10 aa, Artificial sequence
  synthetic sequence
GFSLRTSGAG

SEQ ID NO: 637 - protein, 10 aa, Artificial sequence
  synthetic sequence
GFSLTDPTMG

SEQ ID NO: 638 - protein, 8 aa, Artificial sequence
  synthetic sequence
GYTFTAYY

SEQ ID NO: 639 - protein, 8 aa, Artificial sequence
  synthetic sequence
GGPFSGYY

SEQ ID NO: 640 - protein, 8 aa, Artificial sequence
  synthetic sequence
GIIFTNYW

SEQ ID NO: 641 - protein, 8 aa, Artificial sequence
  synthetic sequence
GYSFTSYD

SEQ ID NO: 642 - protein, 8 aa, Artificial sequence
  synthetic sequence
GLPFTNYA

SEQ ID NO: 643 - protein, 8 aa, Artificial sequence
  synthetic sequence
GGTFSRYG

SEQ ID NO: 644 - protein, 8 aa, Artificial sequence
  synthetic sequence
GFNFKTHA

SEQ ID NO: 645 - protein, 8 aa, Artificial sequence
  synthetic sequence
GYSFSNYW

SEQ ID NO: 646 - protein, 10 aa, Artificial sequence
  synthetic sequence
GFSLSNAAMG

SEQ ID NO: 647 - protein, 8 aa, Artificial sequence
  synthetic sequence
GFSFNNHG

SEQ ID NO: 648 - protein, 10 aa, Artificial sequence
  synthetic sequence
GFSLRNAAMG

SEQ ID NO: 649 - protein, 8 aa, Artificial sequence
  synthetic sequence
GFRFSNFG

SEQ ID NO: 650 - protein, 8 aa, Artificial sequence
  synthetic sequence
GFSFSSYA

SEQ ID NO: 651 - protein, 8 aa, Artificial sequence
  synthetic sequence
GFAFTNYA

SEQ ID NO: 652 - protein, 8 aa, Artificial sequence
  synthetic sequence
GFTFSDYF

SEQ ID NO: 653 - protein, 10 aa, Artificial sequence
  synthetic sequence
GFSLSDPTMG

SEQ ID NO: 654 - protein, 8 aa, Artificial sequence
  synthetic sequence
GGSFRGYY

SEQ ID NO: 655 - protein, 10 aa, Artificial sequence
  synthetic sequence
GFSLNDPTVG

SEQ ID NO: 656 - protein, 8 aa, Artificial sequence
  synthetic sequence
GFTFSTYS

SEQ ID NO: 657 - protein, 8 aa, Artificial sequence
  synthetic sequence
GYSFTSFW

SEQ ID NO: 658 - protein, 8 aa, Artificial sequence
  synthetic sequence
GLTFSKAW

SEQ ID NO: 659 - protein, 8 aa, Artificial sequence
  synthetic sequence
GFPFSDYA

SEQ ID NO: 660 - protein, 8 aa, Artificial sequence
  synthetic sequence
GYTFTNYF

SEQ ID NO: 661 - protein, 8 aa, Artificial sequence
  synthetic sequence
GLTVSSTH

SEQ ID NO: 662 - protein, 10 aa, Artificial sequence
  synthetic sequence
GGSISDSSYY

SEQ ID NO: 663 - protein, 10 aa, Artificial sequence
  synthetic sequence
DFSLGSSGVG

SEQ ID NO: 664 - protein, 8 aa, Artificial sequence
  synthetic sequence
GFPFDTYS

SEQ ID NO: 665 - protein, 8 aa, Artificial sequence
  synthetic sequence
GFAFRDYG

SEQ ID NO: 666 - protein, 8 aa, Artificial sequence
  synthetic sequence
GFTFSKYA

SEQ ID NO: 667 - protein, 8 aa, Artificial sequence
  synthetic sequence
GESFRGYS

SEQ ID NO: 668 - protein, 8 aa, Artificial sequence
  synthetic sequence
GYTFTDCY

SEQ ID NO: 669 - protein, 8 aa, Artificial sequence
  synthetic sequence
EYTFIDYY

SEQ ID NO: 670 - protein, 8 aa, Artificial sequence
  synthetic sequence
TGSITTDS

SEQ ID NO: 671 - protein, 8 aa, Artificial sequence
  synthetic sequence
GDSISSFH

SEQ ID NO: 672 - protein, 8 aa, Artificial sequence
  synthetic sequence
GFSVSTNY

SEQ ID NO: 673 - protein, 8 aa, Artificial sequence
  synthetic sequence
GFSFSSHG

SEQ ID NO: 674 - protein, 10 aa, Artificial sequence
  synthetic sequence
GVSITRSTDY

SEQ ID NO: 675 - protein, 8 aa, Artificial sequence
  synthetic sequence
GGSINSYF

SEQ ID NO: 676 - protein, 9 aa, Artificial sequence
  synthetic sequence
GDSIASSSW

SEQ ID NO: 677 - protein, 10 aa, Artificial sequence
  synthetic sequence
GGSISASSYY

SEQ ID NO: 678 - protein, 8 aa, Artificial sequence
  synthetic sequence
GFTFTDYW

SEQ ID NO: 679 - protein, 8 aa, Artificial sequence
  synthetic sequence
GITFTNAW

SEQ ID NO: 680 - protein, 10 aa, Artificial sequence
  synthetic sequence
GFSLSTSGMR

SEQ ID NO: 681 - protein, 8 aa, Artificial sequence
  synthetic sequence
AFTFSNYW

SEQ ID NO: 682 - protein, 8 aa, Artificial sequence
  synthetic sequence
GSTFRNSW

SEQ ID NO: 683 - protein, 10 aa, Artificial sequence
  synthetic sequence
GGSISRSNYF

SEQ ID NO: 684 - protein, 10 aa, Artificial sequence
  synthetic sequence
GGSISSNNYY

SEQ ID NO: 685 - protein, 10 aa, Artificial sequence
  synthetic sequence
GGSISASNYY

SEQ ID NO: 686 - protein, 10 aa, Artificial sequence
  synthetic sequence
GGSISSSSQY

SEQ ID NO: 687 - protein, 8 aa, Artificial sequence
  synthetic sequence
GFTFSHYW

SEQ ID NO: 688 - protein, 8 aa, Artificial sequence
  synthetic sequence
GDSISTYY

SEQ ID NO: 689 - protein, 9 aa, Artificial sequence
  synthetic sequence
GDSISSKNW

SEQ ID NO: 690 - protein, 8 aa, Artificial sequence
  synthetic sequence
GFSFSTYW

SEQ ID NO: 691 - protein, 9 aa, Artificial sequence
  synthetic sequence
GDSVSSSNW

SEQ ID NO: 692 - protein, 8 aa, Artificial sequence
  synthetic sequence
GFTFSNHW

SEQ ID NO: 693 - protein, 10 aa, Artificial sequence
  synthetic sequence
GDSVSGGNYY

SEQ ID NO: 694 - protein, 8 aa, Artificial sequence
  synthetic sequence
GESFSDYY

SEQ ID NO: 695 - protein, 10 aa, Artificial sequence
  synthetic sequence
GGSISGSSYY

SEQ ID NO: 696 - protein, 8 aa, Artificial sequence
  synthetic sequence
GFTLSSYE

SEQ ID NO: 697 - protein, 10 aa, Artificial sequence
  synthetic sequence
GFSLNTAGMC

SEQ ID NO: 698 - protein, 10 aa, Artificial sequence
  synthetic sequence
DGSISSSSYF

SEQ ID NO: 699 - protein, 8 aa, Artificial sequence
  synthetic sequence
GFIFSNYA

SEQ ID NO: 700 - protein, 10 aa, Artificial sequence
  synthetic sequence
GGSVRSGDYY

SEQ ID NO: 701 - protein, 7 aa, Artificial sequence
  synthetic sequence
LNTDGMR

SEQ ID NO: 702 - protein, 10 aa, Artificial sequence
  synthetic sequence
GGSISSNSYF

SEQ ID NO: 703 - protein, 8 aa, Artificial sequence
  synthetic sequence
GYTFTFYY

SEQ ID NO: 704 - protein, 10 aa, Artificial sequence
  synthetic sequence
GFSLSTSGVS

SEQ ID NO: 705 - protein, 8 aa, Artificial sequence
  synthetic sequence
GGSIGSYY

SEQ ID NO: 706 - protein, 8 aa, Artificial sequence
  synthetic sequence
SGSFSDHT

SEQ ID NO: 707 - protein, 8 aa, Artificial sequence
  synthetic sequence
GFSFSSYW

SEQ ID NO: 708 - protein, 9 aa, Artificial sequence
  synthetic sequence
GDSISSSNW

SEQ ID NO: 709 - protein, 10 aa, Artificial sequence
  synthetic sequence
GFSLNTERMR

SEQ ID NO: 710 - protein, 10 aa, Artificial sequence
  synthetic sequence
GDSISSSNYY

SEQ ID NO: 711 - protein, 9 aa, Artificial sequence
  synthetic sequence
GASISGSNW

SEQ ID NO: 712 - protein, 9 aa, Artificial sequence
  synthetic sequence
GVSISSSNW

SEQ ID NO: 713 - protein, 9 aa, Artificial sequence
  synthetic sequence
GGSVNSINW

SEQ ID NO: 714 - protein, 9 aa, Artificial sequence
  synthetic sequence
GDSISRSNW

SEQ ID NO: 715 - protein, 8 aa, Artificial sequence
  synthetic sequence
GYTFISYY

SEQ ID NO: 716 - protein, 8 aa, Artificial sequence
  synthetic sequence
GYKFTSYG

SEQ ID NO: 717 - protein, 8 aa, Artificial sequence
  synthetic sequence
EGTFNNYA

SEQ ID NO: 718 - protein, 8 aa, Artificial sequence
  synthetic sequence
GFTFSSNW

SEQ ID NO: 719 - protein, 9 aa, Artificial sequence
  synthetic sequence
GGSINSNNW

SEQ ID NO: 720 - protein, 8 aa, Artificial sequence
  synthetic sequence
GFTFGQYA

SEQ ID NO: 721 - protein, 8 aa, Artificial sequence
  synthetic sequence
GFAFSTSW

SEQ ID NO: 722 - protein, 8 aa, Artificial sequence
  synthetic sequence
GYNFNDYY

SEQ ID NO: 723 - protein, 10 aa, Artificial sequence
  synthetic sequence
GFSLSTSGLR

SEQ ID NO: 724 - protein, 8 aa, Artificial sequence
  synthetic sequence
GGSIVSYY

SEQ ID NO: 725 - protein, 8 aa, Artificial sequence
  synthetic sequence
GFTLTNYA

SEQ ID NO: 726 - protein, 8 aa, Artificial sequence
  synthetic sequence
GDTFSNYA

SEQ ID NO: 727 - protein, 8 aa, Artificial sequence
  synthetic sequence
GFSFSNYV

SEQ ID NO: 728 - protein, 10 aa, Artificial sequence
  synthetic sequence
GFSFSTPGMA

SEQ ID NO: 729 - protein, 10 aa, Artificial sequence
  synthetic sequence
GFSLTTPGLT

SEQ ID NO: 730 - protein, 8 aa, Artificial sequence
  synthetic sequence
GFTFTSYW

SEQ ID NO: 731 - protein, 10 aa, Artificial sequence
  synthetic sequence
GFSLNTSGVG

SEQ ID NO: 732 - protein, 8 aa, Artificial sequence
  synthetic sequence
HGSISTYH

SEQ ID NO: 733 - protein, 10 aa, Artificial sequence
  synthetic sequence
GDAVSSGSYY

SEQ ID NO: 734 - protein, 10 aa, Artificial sequence
  synthetic sequence
GGSISSTNYY

SEQ ID NO: 735 - protein, 10 aa, Artificial sequence
  synthetic sequence
GGSVSSGTYW

SEQ ID NO: 736 - protein, 10 aa, Artificial sequence
  synthetic sequence
GDSISSSTYY

SEQ ID NO: 737 - protein, 8 aa, Artificial sequence
  synthetic sequence
GFTFNDYW

SEQ ID NO: 738 - protein, 10 aa, Artificial sequence
  synthetic sequence
GDSVSSGTYW

SEQ ID NO: 739 - protein, 9 aa, Artificial sequence
  synthetic sequence
GASISSTDW

SEQ ID NO: 740 - protein, 8 aa, Artificial sequence
  synthetic sequence
GFTFNTYE

SEQ ID NO: 741 - protein, 10 aa, Artificial sequence
  synthetic sequence
GFSLSNARMA

SEQ ID NO: 742 - protein, 8 aa, Artificial sequence
  synthetic sequence
GFTVRNSY

SEQ ID NO: 743 - protein, 10 aa, Artificial sequence
  synthetic sequence
GFSLSNTKMG

SEQ ID NO: 744 - protein, 10 aa, Artificial sequence
  synthetic sequence
GFSLSNPRMG

SEQ ID NO: 745 - protein, 10 aa, Artificial sequence
  synthetic sequence
GGSISSSFYY

SEQ ID NO: 746 - protein, 8 aa, Artificial sequence
  synthetic sequence
GFSFSNYW

SEQ ID NO: 747 - protein, 10 aa, Artificial sequence
  synthetic sequence
GFSLSTGGVG

SEQ ID NO: 748 - protein, 9 aa, Artificial sequence
  synthetic sequence
GGSISSYDW

SEQ ID NO: 749 - protein, 8 aa, Artificial sequence
  synthetic sequence
GGYITAYY

SEQ ID NO: 750 - protein, 8 aa, Artificial sequence
  synthetic sequence
GFTVSTNY

SEQ ID NO: 751 - protein, 10 aa, Artificial sequence
  synthetic sequence
GFSLSTSGVG

SEQ ID NO: 752 - protein, 8 aa, Artificial sequence
  synthetic sequence
GFTFSMYW

SEQ ID NO: 753 - protein, 8 aa, Artificial sequence
  synthetic sequence
GGSISRDY

SEQ ID NO: 754 - protein, 8 aa, Artificial sequence
  synthetic sequence
GDSISGYF

SEQ ID NO: 755 - protein, 10 aa, Artificial sequence
  synthetic sequence
GGSINTGHYY

SEQ ID NO: 756 - protein, 8 aa, Artificial sequence
  synthetic sequence
RFMFSSYW

SEQ ID NO: 757 - protein, 10 aa, Artificial sequence
  synthetic sequence
GGSIRRSSYY

SEQ ID NO: 758 - protein, 10 aa, Artificial sequence
  synthetic sequence
GGSISKSTYY

SEQ ID NO: 759 - protein, 4 aa, Artificial sequence
  synthetic sequence
GASI

SEQ ID NO: 760 - protein, 10 aa, Artificial sequence
  synthetic sequence
GGSISSSSFF

SEQ ID NO: 761 - protein, 10 aa, Artificial sequence
  synthetic sequence
GFSLSNARMG

SEQ ID NO: 762 - protein, 10 aa, Artificial sequence
  synthetic sequence
GFSLSSSGLC

SEQ ID NO: 763 - protein, 10 aa, Artificial sequence
  synthetic sequence
GVSISSGRYY

SEQ ID NO: 764 - protein, 10 aa, Artificial sequence
  synthetic sequence
GFSFTTSGVG

SEQ ID NO: 765 - protein, 8 aa, Artificial sequence
  synthetic sequence
GGSVSNYY

SEQ ID NO: 766 - protein, 8 aa, Artificial sequence
  synthetic sequence
GYSFTDYW

SEQ ID NO: 767 - protein, 10 aa, Artificial sequence
  synthetic sequence
GGSISSSGHY

SEQ ID NO: 768 - protein, 8 aa, Artificial sequence
  synthetic sequence
GFSFRSYV

SEQ ID NO: 769 - protein, 10 aa, Artificial sequence
  synthetic sequence
GGSIGSSSDY

SEQ ID NO: 770 - protein, 10 aa, Artificial sequence
  synthetic sequence
GGFISSSSSY

SEQ ID NO: 771 - protein, 8 aa, Artificial sequence
  synthetic sequence
GFTFNSYA

SEQ ID NO: 772 - protein, 10 aa, Artificial sequence
  synthetic sequence
GFSLSISGVG

SEQ ID NO: 773 - protein, 8 aa, Artificial sequence
  synthetic sequence
GGSITRYY

SEQ ID NO: 774 - protein, 10 aa, Artificial sequence
  synthetic sequence
GGSISDTTYY

SEQ ID NO: 775 - protein, 10 aa, Artificial sequence
  synthetic sequence
GGSISSSDYY

SEQ ID NO: 776 - protein, 10 aa, Artificial sequence
  synthetic sequence
GGSITTNHYY

SEQ ID NO: 777 - protein, 10 aa, Artificial sequence
  synthetic sequence
RGSISSSTDY

SEQ ID NO: 778 - protein, 8 aa, Artificial sequence
  synthetic sequence
GGSINSYY

SEQ ID NO: 779 - protein, 10 aa, Artificial sequence
  synthetic sequence
GFSLSNTRMG

SEQ ID NO: 780 - protein, 10 aa, Artificial sequence
  synthetic sequence
GFSLTTGGVG

SEQ ID NO: 781 - protein, 10 aa, Artificial sequence
  synthetic sequence
GGSINSGDHY

SEQ ID NO: 782 - protein, 10 aa, Artificial sequence
  synthetic sequence
GGSISSGGYS

SEQ ID NO: 783 - protein, 10 aa, Artificial sequence
  synthetic sequence
GGSISSSPYY

SEQ ID NO: 784 - protein, 8 aa, Artificial sequence
  synthetic sequence
GFTFSSYR

SEQ ID NO: 785 - protein, 8 aa, Artificial sequence
  synthetic sequence
GGSFSGSY

SEQ ID NO: 786 - protein, 8 aa, Artificial sequence
  synthetic sequence
GFTFSDHW

SEQ ID NO: 787 - protein, 8 aa, Artificial sequence
  synthetic sequence
GFMFSNYC

SEQ ID NO: 788 - protein, 8 aa, Artificial sequence
  synthetic sequence
RYTFTKYF

SEQ ID NO: 789 - protein, 10 aa, Artificial sequence
  synthetic sequence
GDSMTGSLYY

SEQ ID NO: 790 - protein, 8 aa, Artificial sequence
  synthetic sequence
GFSFSSFW

SEQ ID NO: 791 - protein, 8 aa, Artificial sequence
  synthetic sequence
GGSISNVY

SEQ ID NO: 792 - protein, 8 aa, Artificial sequence
  synthetic sequence
GFSFTSSW

SEQ ID NO: 793 - protein, 8 aa, Artificial sequence
  synthetic sequence
GFTFSSYQ

SEQ ID NO: 794 - protein, 8 aa, Artificial sequence
  synthetic sequence
GFTFGDYG

SEQ ID NO: 795 - protein, 8 aa, Artificial sequence
  synthetic sequence
GGSIGSFY

SEQ ID NO: 796 - protein, 10 aa, Artificial sequence
  synthetic sequence
GGSIRGSSYY

SEQ ID NO: 797 - protein, 10 aa, Artificial sequence
  synthetic sequence
GGALGSGNYY

SEQ ID NO: 798 - protein, 10 aa, Artificial sequence
  synthetic sequence
GGSISSGSYY

SEQ ID NO: 799 - protein, 10 aa, Artificial sequence
  synthetic sequence
GFSLTTRGVG

SEQ ID NO: 800 - protein, 8 aa, Artificial sequence
  synthetic sequence
GFMFSNYW

SEQ ID NO: 801 - protein, 8 aa, Artificial sequence
  synthetic sequence
GGSISSHY

SEQ ID NO: 802 - protein, 10 aa, Artificial sequence
  synthetic sequence
GVSISSNSYY

SEQ ID NO: 803 - protein, 10 aa, Artificial sequence
  synthetic sequence
GASISTSSFY

SEQ ID NO: 804 - protein, 10 aa, Artificial sequence
  synthetic sequence
GFSFYTRGVG

SEQ ID NO: 805 - protein, 9 aa, Artificial sequence
  synthetic sequence
RRSISSYDW

SEQ ID NO: 806 - protein, 8 aa, Artificial sequence
  synthetic sequence
GFTFTNYD

SEQ ID NO: 807 - protein, 10 aa, Artificial sequence
  synthetic sequence
GGSISSGAFY

SEQ ID NO: 808 - protein, 8 aa, Artificial sequence
  synthetic sequence
GGSISSYF

SEQ ID NO: 809 - protein, 8 aa, Artificial sequence
  synthetic sequence
GFMFSSYW

SEQ ID NO: 810 - protein, 10 aa, Artificial sequence
  synthetic sequence
GDSIRSSGSY

SEQ ID NO: 811 - protein, 8 aa, Artificial sequence
  synthetic sequence
EFTVSSNY

SEQ ID NO: 812 - protein, 8 aa, Artificial sequence
  synthetic sequence
GGSINNFY

SEQ ID NO: 813 - protein, 10 aa, Artificial sequence
  synthetic sequence
GDSVSSSSYY

SEQ ID NO: 814 - protein, 8 aa, Artificial sequence
  synthetic sequence
GFTFSDFW

SEQ ID NO: 815 - protein, 8 aa, Artificial sequence
  synthetic sequence
GVSISTYY

SEQ ID NO: 816 - protein, 8 aa, Artificial sequence
  synthetic sequence
GGSFSGYN

SEQ ID NO: 817 - protein, 8 aa, Artificial sequence
  synthetic sequence
GLTVSDNY

SEQ ID NO: 818 - protein, 8 aa, Artificial sequence
  synthetic sequence
GYSFTSYL

SEQ ID NO: 819 - protein, 10 aa, Artificial sequence
  synthetic sequence
GGSINSSSYY

SEQ ID NO: 820 - protein, 8 aa, Artificial sequence
  synthetic sequence
GLTFSTAA

SEQ ID NO: 821 - protein, 10 aa, Artificial sequence
  synthetic sequence
GFSVSNARMG

SEQ ID NO: 822 - protein, 10 aa, Artificial sequence
  synthetic sequence
GFSLSDPRMG

SEQ ID NO: 823 - protein, 10 aa, Artificial sequence
  synthetic sequence
GGSMNSGRYS

SEQ ID NO: 824 - protein, 10 aa, Artificial sequence
  synthetic sequence
GFSLSNVRMG

SEQ ID NO: 825 - protein, 10 aa, Artificial sequence
  synthetic sequence
GASIRRSNYY

SEQ ID NO: 826 - protein, 8 aa, Artificial sequence
  synthetic sequence
GFNLSNNY

SEQ ID NO: 827 - protein, 10 aa, Artificial sequence
  synthetic sequence
GFSLYTRGVG

SEQ ID NO: 828 - protein, 10 aa, Artificial sequence
  synthetic sequence
GGSFNTASHY

SEQ ID NO: 829 - protein, 8 aa, Artificial sequence
  synthetic sequence
GFTFSSAW

SEQ ID NO: 830 - protein, 10 aa, Artificial sequence
  synthetic sequence
GFSLSTSGLC

SEQ ID NO: 831 - protein, 10 aa, Artificial sequence
  synthetic sequence
GGSISGTNYY

SEQ ID NO: 832 - protein, 8 aa, Artificial sequence
  synthetic sequence
GFTFDGYA

SEQ ID NO: 833 - protein, 10 aa, Artificial sequence
  synthetic sequence
GGSIISTNSY

SEQ ID NO: 834 - protein, 8 aa, Artificial sequence
  synthetic sequence
GFTFTRYW

SEQ ID NO: 835 - protein, 8 aa, Artificial sequence
  synthetic sequence
GGSINTYY

SEQ ID NO: 836 - protein, 10 aa, Artificial sequence
  synthetic sequence
AGAITNNNYY

SEQ ID NO: 837 - protein, 8 aa, Artificial sequence
  synthetic sequence
GFTFINYA

SEQ ID NO: 838 - protein, 9 aa, Artificial sequence
  synthetic sequence
GDSISSTNW

SEQ ID NO: 839 - protein, 8 aa, Artificial sequence
  synthetic sequence
GDSISNYY

SEQ ID NO: 840 - protein, 8 aa, Artificial sequence
  synthetic sequence
GGSITTYY

SEQ ID NO: 841 - protein, 8 aa, Artificial sequence
  synthetic sequence
GDTFNNFA

SEQ ID NO: 842 - protein, 10 aa, Artificial sequence
  synthetic sequence
GGSIISINYY

SEQ ID NO: 843 - protein, 10 aa, Artificial sequence
  synthetic sequence
GFSLSTTGMC

SEQ ID NO: 844 - protein, 4 aa, Artificial sequence
  synthetic sequence
GYAL

SEQ ID NO: 845 - protein, 8 aa, Artificial sequence
  synthetic sequence
GLTVSRNY

SEQ ID NO: 846 - protein, 8 aa, Artificial sequence
  synthetic sequence
GFSVTTTY

SEQ ID NO: 847 - protein, 10 aa, Artificial sequence
  synthetic sequence
GGSISTSSYY

SEQ ID NO: 848 - protein, 8 aa, Artificial sequence
  synthetic sequence
GASISSYH

SEQ ID NO: 849 - protein, 10 aa, Artificial sequence
  synthetic sequence
EFSLSTSGVG

SEQ ID NO: 850 - protein, 8 aa, Artificial sequence
  synthetic sequence
GYSFTGYW

SEQ ID NO: 851 - protein, 8 aa, Artificial sequence
  synthetic sequence
GGSISSYS

SEQ ID NO: 852 - protein, 10 aa, Artificial sequence
  synthetic sequence
GFSLSNPRMA

SEQ ID NO: 853 - protein, 10 aa, Artificial sequence
  synthetic sequence
GDSVSSNRAA

SEQ ID NO: 854 - protein, 4 aa, Artificial sequence
  synthetic sequence
STAA

SEQ ID NO: 855 - protein, 10 aa, Artificial sequence
  synthetic sequence
GGSISSTFYY

SEQ ID NO: 856 - protein, 7 aa, Artificial sequence
  synthetic sequence
IYYSGST

SEQ ID NO: 857 - protein, 8 aa, Artificial sequence
  synthetic sequence
ISGSGVST

SEQ ID NO: 858 - protein, 8 aa, Artificial sequence
  synthetic sequence
ISYDGSNK

SEQ ID NO: 859 - protein, 8 aa, Artificial sequence
  synthetic sequence
IIPIFGTA

SEQ ID NO: 860 - protein, 7 aa, Artificial sequence
  synthetic sequence
ISHSGKT

SEQ ID NO: 861 - protein, 8 aa, Artificial sequence
  synthetic sequence
ISPNNGET

SEQ ID NO: 862 - protein, 9 aa, Artificial sequence
  synthetic sequence
TYYRSKWYN

SEQ ID NO: 863 - protein, 8 aa, Artificial sequence
  synthetic sequence
MNPNSGNT

SEQ ID NO: 864 - protein, 8 aa, Artificial sequence
  synthetic sequence
INTNTGNP

SEQ ID NO: 865 - protein, 8 aa, Artificial sequence
  synthetic sequence
INPNSGET

SEQ ID NO: 866 - protein, 8 aa, Artificial sequence
  synthetic sequence
ITGSGDST

SEQ ID NO: 867 - protein, 7 aa, Artificial sequence
  synthetic sequence
ISHRGKT

SEQ ID NO: 868 - protein, 8 aa, Artificial sequence
  synthetic sequence
ISSSSSTI

SEQ ID NO: 869 - protein, 7 aa, Artificial sequence
  synthetic sequence
IYHDGSP

SEQ ID NO: 870 - protein, 8 aa, Artificial sequence
  synthetic sequence
IWYDGSNK

SEQ ID NO: 871 - protein, 7 aa, Artificial sequence
  synthetic sequence
YATAADT

SEQ ID NO: 872 - protein, 7 aa, Artificial sequence
  synthetic sequence
FYYSGNT

SEQ ID NO: 873 - protein, 8 aa, Artificial sequence
  synthetic sequence
IKEDGSQK

SEQ ID NO: 874 - protein, 7 aa, Artificial sequence
  synthetic sequence
IDYSGSN

SEQ ID NO: 875 - protein, 7 aa, Artificial sequence
  synthetic sequence
IYYSGNT

SEQ ID NO: 876 - protein, 8 aa, Artificial sequence
  synthetic sequence
ISDDGSSK

SEQ ID NO: 877 - protein, 7 aa, Artificial sequence
  synthetic sequence
VYFSGRT

SEQ ID NO: 878 - protein, 8 aa, Artificial sequence
  synthetic sequence
INLDGSEK

SEQ ID NO: 879 - protein, 7 aa, Artificial sequence
  synthetic sequence
IFYSGST

SEQ ID NO: 880 - protein, 8 aa, Artificial sequence
  synthetic sequence
IKKDGSEK

SEQ ID NO: 881 - protein, 7 aa, Artificial sequence
  synthetic sequence
IYYSGIT

SEQ ID NO: 882 - protein, 7 aa, Artificial sequence
  synthetic sequence
IFASGNT

SEQ ID NO: 883 - protein, 7 aa, Artificial sequence
  synthetic sequence
IDWDEEK

SEQ ID NO: 884 - protein, 7 aa, Artificial sequence
  synthetic sequence
INWDDEK

SEQ ID NO: 885 - protein, 7 aa, Artificial sequence
  synthetic sequence
INHSGST

SEQ ID NO: 886 - protein, 7 aa, Artificial sequence
  synthetic sequence
IDSSGST

SEQ ID NO: 887 - protein, 7 aa, Artificial sequence
  synthetic sequence
IYWEDDK

SEQ ID NO: 888 - protein, 7 aa, Artificial sequence
  synthetic sequence
IYSGGST

SEQ ID NO: 889 - protein, 8 aa, Artificial sequence
  synthetic sequence
INNDGSFT

SEQ ID NO: 890 - protein, 7 aa, Artificial sequence
  synthetic sequence
IYFTGNT

SEQ ID NO: 891 - protein, 7 aa, Artificial sequence
  synthetic sequence
IFSNGEK

SEQ ID NO: 892 - protein, 8 aa, Artificial sequence
  synthetic sequence
ISPSGDTT

SEQ ID NO: 893 - protein, 7 aa, Artificial sequence
  synthetic sequence
ITHSGAT

SEQ ID NO: 894 - protein, 8 aa, Artificial sequence
  synthetic sequence
VNPYSGDR

SEQ ID NO: 895 - protein, 7 aa, Artificial sequence
  synthetic sequence
IYYSGET

SEQ ID NO: 896 - protein, 7 aa, Artificial sequence
  synthetic sequence
IYWNDDK

SEQ ID NO: 897 - protein, 7 aa, Artificial sequence
  synthetic sequence
INHGGST

SEQ ID NO: 898 - protein, 7 aa, Artificial sequence
  synthetic sequence
MDHGGIT

SEQ ID NO: 899 - protein, 8 aa, Artificial sequence
  synthetic sequence
ISADTGKT

SEQ ID NO: 900 - protein, 8 aa, Artificial sequence
  synthetic sequence
ISYDGRRK

SEQ ID NO: 901 - protein, 8 aa, Artificial sequence
  synthetic sequence
IIWSGGRT

SEQ ID NO: 902 - protein, 8 aa, Artificial sequence
  synthetic sequence
ITGSGSNT

SEQ ID NO: 903 - protein, 8 aa, Artificial sequence
  synthetic sequence
ISYDGSNE

SEQ ID NO: 904 - protein, 8 aa, Artificial sequence
  synthetic sequence
LDWNGGSV

SEQ ID NO: 905 - protein, 8 aa, Artificial sequence
  synthetic sequence
ISSSSDYI

SEQ ID NO: 906 - protein, 7 aa, Artificial sequence
  synthetic sequence
ISYSGSA

SEQ ID NO: 907 - protein, 7 aa, Artificial sequence
  synthetic sequence
INHSGFT

SEQ ID NO: 908 - protein, 7 aa, Artificial sequence
  synthetic sequence
IYTSGST

SEQ ID NO: 909 - protein, 8 aa, Artificial sequence
  synthetic sequence
ISHDGRDK

SEQ ID NO: 910 - protein, 8 aa, Artificial sequence
  synthetic sequence
ISGSGRGT

SEQ ID NO: 911 - protein, 8 aa, Artificial sequence
  synthetic sequence
INPYRGGT

SEQ ID NO: 912 - protein, 7 aa, Artificial sequence
  synthetic sequence
IHHSGGA

SEQ ID NO: 913 - protein, 8 aa, Artificial sequence
  synthetic sequence
ISGSGGTT

SEQ ID NO: 914 - protein, 8 aa, Artificial sequence
  synthetic sequence
ISHDGSEK

SEQ ID NO: 915 - protein, 8 aa, Artificial sequence
  synthetic sequence
ISAYSGNT

SEQ ID NO: 916 - protein, 8 aa, Artificial sequence
  synthetic sequence
ISHDGRKE

SEQ ID NO: 917 - protein, 8 aa, Artificial sequence
  synthetic sequence
ISYDGNNK

SEQ ID NO: 918 - protein, 8 aa, Artificial sequence
  synthetic sequence
INTDNGNT

SEQ ID NO: 919 - protein, 7 aa, Artificial sequence
  synthetic sequence
IYHSGST

SEQ ID NO: 920 - protein, 8 aa, Artificial sequence
  synthetic sequence
INPRTGGT

SEQ ID NO: 921 - protein, 8 aa, Artificial sequence
  synthetic sequence
ISGGSTYI

SEQ ID NO: 922 - protein, 8 aa, Artificial sequence
  synthetic sequence
IKEDGSEK

SEQ ID NO: 923 - protein, 8 aa, Artificial sequence
  synthetic sequence
VSSAGNYI

SEQ ID NO: 924 - protein, 7 aa, Artificial sequence
  synthetic sequence
MYNSGNI

SEQ ID NO: 925 - protein, 8 aa, Artificial sequence
  synthetic sequence
IIPLFGMI

SEQ ID NO: 926 - protein, 10 aa, Artificial sequence
  synthetic sequence
IGSKVYGGTT

SEQ ID NO: 927 - protein, 8 aa, Artificial sequence
  synthetic sequence
ISHDGRNE

SEQ ID NO: 928 - protein, 7 aa, Artificial sequence
  synthetic sequence
IFWDDDK

SEQ ID NO: 929 - protein, 7 aa, Artificial sequence
  synthetic sequence
SPSASTT

SEQ ID NO: 930 - protein, 8 aa, Artificial sequence
  synthetic sequence
INPRNGAT

SEQ ID NO: 931 - protein, 7 aa, Artificial sequence
  synthetic sequence
IYYTGST

SEQ ID NO: 932 - protein, 7 aa, Artificial sequence
  synthetic sequence
MYHSGST

SEQ ID NO: 933 - protein, 7 aa, Artificial sequence
  synthetic sequence
LYSGGKT

SEQ ID NO: 934 - protein, 7 aa, Artificial sequence
  synthetic sequence
IHHSGRT

SEQ ID NO: 935 - protein, 7 aa, Artificial sequence
  synthetic sequence
IYQSGNT

SEQ ID NO: 936 - protein, 8 aa, Artificial sequence
  synthetic sequence
MSGTGGSR

SEQ ID NO: 937 - protein, 8 aa, Artificial sequence
  synthetic sequence
INDDGSYT

SEQ ID NO: 938 - protein, 7 aa, Artificial sequence
  synthetic sequence
IYDSGST

SEQ ID NO: 939 - protein, 7 aa, Artificial sequence
  synthetic sequence
ISSSGSS

SEQ ID NO: 940 - protein, 7 aa, Artificial sequence
  synthetic sequence
IYNSGST

SEQ ID NO: 941 - protein, 8 aa, Artificial sequence
  synthetic sequence
INYSDDST

SEQ ID NO: 942 - protein, 8 aa, Artificial sequence
  synthetic sequence
ISSDGNRI

SEQ ID NO: 943 - protein, 7 aa, Artificial sequence
  synthetic sequence
MYYSGST

SEQ ID NO: 944 - protein, 7 aa, Artificial sequence
  synthetic sequence
VYYRGSP

SEQ ID NO: 945 - protein, 8 aa, Artificial sequence
  synthetic sequence
IISTFGAA

SEQ ID NO: 946 - protein, 8 aa, Artificial sequence
  synthetic sequence
INSDGSTT

SEQ ID NO: 947 - protein, 8 aa, Artificial sequence
  synthetic sequence
TYPGNSDT

SEQ ID NO: 948 - protein, 7 aa, Artificial sequence
  synthetic sequence
IYADGST

SEQ ID NO: 949 - protein, 8 aa, Artificial sequence
  synthetic sequence
IYLDDSHT

SEQ ID NO: 950 - protein, 8 aa, Artificial sequence
  synthetic sequence
INPYSGDR

SEQ ID NO: 951 - protein, 8 aa, Artificial sequence
  synthetic sequence
FDPEDGDT

SEQ ID NO: 952 - protein, 6 aa, Artificial sequence
  synthetic sequence
IFYSGT

SEQ ID NO: 953 - protein, 8 aa, Artificial sequence
  synthetic sequence
ISPAGGST

SEQ ID NO: 954 - protein, 8 aa, Artificial sequence
  synthetic sequence
ISYHGRNK

SEQ ID NO: 955 - protein, 7 aa, Artificial sequence
  synthetic sequence
VYHSGST

SEQ ID NO: 956 - protein, 8 aa, Artificial sequence
  synthetic sequence
INWNSRTP

SEQ ID NO: 957 - protein, 7 aa, Artificial sequence
  synthetic sequence
IYYSGSA

SEQ ID NO: 958 - protein, 8 aa, Artificial sequence
  synthetic sequence
ISYDGREK

SEQ ID NO: 959 - protein, 8 aa, Artificial sequence
  synthetic sequence
ISYHGRNN

SEQ ID NO: 960 - protein, 7 aa, Artificial sequence
  synthetic sequence
IYSGGSI

SEQ ID NO: 961 - protein, 8 aa, Artificial sequence
  synthetic sequence
INPHSGDT

SEQ ID NO: 962 - protein, 8 aa, Artificial sequence
  synthetic sequence
IDPSDSYT

SEQ ID NO: 963 - protein, 8 aa, Artificial sequence
  synthetic sequence
ISGSGGGK

SEQ ID NO: 964 - protein, 7 aa, Artificial sequence
  synthetic sequence
IYSSGTT

SEQ ID NO: 965 - protein, 8 aa, Artificial sequence
  synthetic sequence
ISWDGGTI

SEQ ID NO: 966 - protein, 8 aa, Artificial sequence
  synthetic sequence
ISWNSATS

SEQ ID NO: 967 - protein, 8 aa, Artificial sequence
  synthetic sequence
ISYDGVIK

SEQ ID NO: 968 - protein, 7 aa, Artificial sequence
  synthetic sequence
IEYRGST

SEQ ID NO: 969 - protein, 8 aa, Artificial sequence
  synthetic sequence
IWFDGTKE

SEQ ID NO: 970 - protein, 7 aa, Artificial sequence
  synthetic sequence
IYYTGRT

SEQ ID NO: 971 - protein, 7 aa, Artificial sequence
  synthetic sequence
IYHSGIT

SEQ ID NO: 972 - protein, 7 aa, Artificial sequence
  synthetic sequence
IYFTGSA

SEQ ID NO: 973 - protein, 8 aa, Artificial sequence
  synthetic sequence
IWYDGSYK

SEQ ID NO: 974 - protein, 8 aa, Artificial sequence
  synthetic sequence
IKQDGSEK

SEQ ID NO: 975 - protein, 8 aa, Artificial sequence
  synthetic sequence
ISTYTGDT

SEQ ID NO: 976 - protein, 8 aa, Artificial sequence
  synthetic sequence
ISIDASKT

SEQ ID NO: 977 - protein, 8 aa, Artificial sequence
  synthetic sequence
IKQDGNEK

SEQ ID NO: 978 - protein, 7 aa, Artificial sequence
  synthetic sequence
IFSNDEK

SEQ ID NO: 979 - protein, 7 aa, Artificial sequence
  synthetic sequence
IYYGGTT

SEQ ID NO: 980 - protein, 8 aa, Artificial sequence
  synthetic sequence
IRQDGTKT

SEQ ID NO: 981 - protein, 8 aa, Artificial sequence
  synthetic sequence
IKPNSGGA

SEQ ID NO: 982 - protein, 7 aa, Artificial sequence
  synthetic sequence
IYTVGQT

SEQ ID NO: 983 - protein, 8 aa, Artificial sequence
  synthetic sequence
IKQDGSEQ

SEQ ID NO: 984 - protein, 8 aa, Artificial sequence
  synthetic sequence
IVPIFATP

SEQ ID NO: 985 - protein, 10 aa, Artificial sequence
  synthetic sequence
IRKKVHSYST

SEQ ID NO: 986 - protein, 8 aa, Artificial sequence
  synthetic sequence
LDWNGGGV

SEQ ID NO: 987 - protein, 7 aa, Artificial sequence
  synthetic sequence
IYHTGRT

SEQ ID NO: 988 - protein, 8 aa, Artificial sequence
  synthetic sequence
ITASAGGT

SEQ ID NO: 989 - protein, 7 aa, Artificial sequence
  synthetic sequence
VYRSGST

SEQ ID NO: 990 - protein, 8 aa, Artificial sequence
  synthetic sequence
INSNGGAT

SEQ ID NO: 991 - protein, 5 aa, Artificial sequence
  synthetic sequence
ISLDK

SEQ ID NO: 992 - protein, 8 aa, Artificial sequence
  synthetic sequence
IKQDGSEG

SEQ ID NO: 993 - protein, 8 aa, Artificial sequence
  synthetic sequence
ISSRTGKT

SEQ ID NO: 994 - protein, 7 aa, Artificial sequence
  synthetic sequence
IYITGVT

SEQ ID NO: 995 - protein, 7 aa, Artificial sequence
  synthetic sequence
IYNSGTT

SEQ ID NO: 996 - protein, 8 aa, Artificial sequence
  synthetic sequence
IIPVLNRS

SEQ ID NO: 997 - protein, 8 aa, Artificial sequence
  synthetic sequence
INGSGGTT

SEQ ID NO: 998 - protein, 8 aa, Artificial sequence
  synthetic sequence
ISGSGSKA

SEQ ID NO: 999 - protein, 7 aa, Artificial sequence
  synthetic sequence
IHMSGRT

SEQ ID NO: 1000 - protein, 7 aa, Artificial sequence
  synthetic sequence
IFYSESA

SEQ ID NO: 1001 - protein, 8 aa, Artificial sequence
  synthetic sequence
INPNNGGT

SEQ ID NO: 1002 - protein, 8 aa, Artificial sequence
  synthetic sequence
ISSDGGST

SEQ ID NO: 1003 - protein, 8 aa, Artificial sequence
  synthetic sequence
MSYDGTKQ

SEQ ID NO: 1004 - protein, 7 aa, Artificial sequence
  synthetic sequence
ISYSGST

SEQ ID NO: 1005 - protein, 8 aa, Artificial sequence
  synthetic sequence
ISGSGGTS

SEQ ID NO: 1006 - protein, 8 aa, Artificial sequence
  synthetic sequence
INGDGSST

SEQ ID NO: 1007 - protein, 8 aa, Artificial sequence
  synthetic sequence
ISGSAGST

SEQ ID NO: 1008 - protein, 7 aa, Artificial sequence
  synthetic sequence
ISYNGNT

SEQ ID NO: 1009 - protein, 8 aa, Artificial sequence
  synthetic sequence
INPKNGGT

SEQ ID NO: 1010 - protein, 8 aa, Artificial sequence
  synthetic sequence
ISWNSGIM

SEQ ID NO: 1011 - protein, 8 aa, Artificial sequence
  synthetic sequence
LSHDGTSP

SEQ ID NO: 1012 - protein, 8 aa, Artificial sequence
  synthetic sequence
VNPYTGNT

SEQ ID NO: 1013 - protein, 8 aa, Artificial sequence
  synthetic sequence
FTDTGGST

SEQ ID NO: 1014 - protein, 8 aa, Artificial sequence
  synthetic sequence
ISYDGNEQ

SEQ ID NO: 1015 - protein, 7 aa, Artificial sequence
  synthetic sequence
IYDTGST

SEQ ID NO: 1016 - protein, 8 aa, Artificial sequence
  synthetic sequence
IKLDGSEK

SEQ ID NO: 1017 - protein, 7 aa, Artificial sequence
  synthetic sequence
TFDSQRT

SEQ ID NO: 1018 - protein, 7 aa, Artificial sequence
  synthetic sequence
VSYSGST

SEQ ID NO: 1019 - protein, 7 aa, Artificial sequence
  synthetic sequence
IFSNGKK

SEQ ID NO: 1020 - protein, 7 aa, Artificial sequence
  synthetic sequence
IYYSGSP

SEQ ID NO: 1021 - protein, 8 aa, Artificial sequence
  synthetic sequence
IGKNGNYI

SEQ ID NO: 1022 - protein, 8 aa, Artificial sequence
  synthetic sequence
LSGRTGST

SEQ ID NO: 1023 - protein, 7 aa, Artificial sequence
  synthetic sequence
IDWDDDK

SEQ ID NO: 1024 - protein, 7 aa, Artificial sequence
  synthetic sequence
TFYSGST

SEQ ID NO: 1025 - protein, 7 aa, Artificial sequence
  synthetic sequence
LYSGGST

SEQ ID NO: 1026 - protein, 7 aa, Artificial sequence
  synthetic sequence
VFYNGGA

SEQ ID NO: 1027 - protein, 8 aa, Artificial sequence
  synthetic sequence
ISFDGSSK

SEQ ID NO: 1028 - protein, 7 aa, Artificial sequence
  synthetic sequence
MFYTGSP

SEQ ID NO: 1029 - protein, 7 aa, Artificial sequence
  synthetic sequence
VFYSGST

SEQ ID NO: 1030 - protein, 7 aa, Artificial sequence
  synthetic sequence
LFSNDEK

SEQ ID NO: 1031 - protein, 7 aa, Artificial sequence
  synthetic sequence
VFDSGNS

SEQ ID NO: 1032 - protein, 8 aa, Artificial sequence
  synthetic sequence
ISPYNDDT

SEQ ID NO: 1033 - protein, 7 aa, Artificial sequence
  synthetic sequence
GYYSGSN

SEQ ID NO: 1034 - protein, 8 aa, Artificial sequence
  synthetic sequence
IYPADSDV

SEQ ID NO: 1035 - protein, 8 aa, Artificial sequence
  synthetic sequence
ISYHGRNT

SEQ ID NO: 1036 - protein, 7 aa, Artificial sequence
  synthetic sequence
IYYSGGT

SEQ ID NO: 1037 - protein, 7 aa, Artificial sequence
  synthetic sequence
IDWDDDT

SEQ ID NO: 1038 - protein, 7 aa, Artificial sequence
  synthetic sequence
IRHGGST

SEQ ID NO: 1039 - protein, 7 aa, Artificial sequence
  synthetic sequence
IFSDDEE

SEQ ID NO: 1040 - protein, 7 aa, Artificial sequence
  synthetic sequence
VNYNGFT

SEQ ID NO: 1041 - protein, 8 aa, Artificial sequence
  synthetic sequence
INPSGGST

SEQ ID NO: 1042 - protein, 7 aa, Artificial sequence
  synthetic sequence
VHHSGSA

SEQ ID NO: 1043 - protein, 8 aa, Artificial sequence
  synthetic sequence
IYPGDSET

SEQ ID NO: 1044 - protein, 7 aa, Artificial sequence
  synthetic sequence
ITHSGSP

SEQ ID NO: 1045 - protein, 7 aa, Artificial sequence
  synthetic sequence
ISDSGTT

SEQ ID NO: 1046 - protein, 7 aa, Artificial sequence
  synthetic sequence
TYNSGST

SEQ ID NO: 1047 - protein, 7 aa, Artificial sequence
  synthetic sequence
VYSSGST

SEQ ID NO: 1048 - protein, 8 aa, Artificial sequence
  synthetic sequence
TNTDGSIT

SEQ ID NO: 1049 - protein, 8 aa, Artificial sequence
  synthetic sequence
ISYDESNE

SEQ ID NO: 1050 - protein, 8 aa, Artificial sequence
  synthetic sequence
ITWDGGIT

SEQ ID NO: 1051 - protein, 8 aa, Artificial sequence
  synthetic sequence
IRGNGDYT

SEQ ID NO: 1052 - protein, 8 aa, Artificial sequence
  synthetic sequence
ISGSGYST

SEQ ID NO: 1053 - protein, 8 aa, Artificial sequence
  synthetic sequence
ISPGDSTT

SEQ ID NO: 1054 - protein, 7 aa, Artificial sequence
  synthetic sequence
IYWDDDR

SEQ ID NO: 1055 - protein, 7 aa, Artificial sequence
  synthetic sequence
IHYTGNT

SEQ ID NO: 1056 - protein, 10 aa, Artificial sequence
  synthetic sequence
IRSKANSYAT

SEQ ID NO: 1057 - protein, 8 aa, Artificial sequence
  synthetic sequence
ISVANGNT

SEQ ID NO: 1058 - protein, 8 aa, Artificial sequence
  synthetic sequence
ISGYNGRR

SEQ ID NO: 1059 - protein, 8 aa, Artificial sequence
  synthetic sequence
INHDGSST

SEQ ID NO: 1060 - protein, 8 aa, Artificial sequence
  synthetic sequence
VSFDGTKK

SEQ ID NO: 1061 - protein, 8 aa, Artificial sequence
  synthetic sequence
INAGKGNR

SEQ ID NO: 1062 - protein, 8 aa, Artificial sequence
  synthetic sequence
IRGSGSNT

SEQ ID NO: 1063 - protein, 8 aa, Artificial sequence
  synthetic sequence
IFPDDSDT

SEQ ID NO: 1064 - protein, 8 aa, Artificial sequence
  synthetic sequence
VSGSGDDT

SEQ ID NO: 1065 - protein, 8 aa, Artificial sequence
  synthetic sequence
ISYEGRTE

SEQ ID NO: 1066 - protein, 9 aa, Artificial sequence
  synthetic sequence
TYYRSKWHN

SEQ ID NO: 1067 - protein, 8 aa, Artificial sequence
  synthetic sequence
MNPNSGNI

SEQ ID NO: 1068 - protein, 8 aa, Artificial sequence
  synthetic sequence
IDQDGSEK

SEQ ID NO: 1069 - protein, 7 aa, Artificial sequence
  synthetic sequence
IYSSGGT

SEQ ID NO: 1070 - protein, 7 aa, Artificial sequence
  synthetic sequence
MYYKGTT

SEQ ID NO: 1071 - protein, 7 aa, Artificial sequence
  synthetic sequence
SYSNDEK

SEQ ID NO: 1072 - protein, 8 aa, Artificial sequence
  synthetic sequence
ISYDGSSK

SEQ ID NO: 1073 - protein, 7 aa, Artificial sequence
  synthetic sequence
INHSGDT

SEQ ID NO: 1074 - protein, 7 aa, Artificial sequence
  synthetic sequence
IDHSGTS

SEQ ID NO: 1075 - protein, 7 aa, Artificial sequence
  synthetic sequence
VDYRGST

SEQ ID NO: 1076 - protein, 7 aa, Artificial sequence
  synthetic sequence
INHSGNT

SEQ ID NO: 1077 - protein, 7 aa, Artificial sequence
  synthetic sequence
IYWDGDK

SEQ ID NO: 1078 - protein, 7 aa, Artificial sequence
  synthetic sequence
VYGTGNT

SEQ ID NO: 1079 - protein, 8 aa, Artificial sequence
  synthetic sequence
ISSHGTDE

SEQ ID NO: 1080 - protein, 8 aa, Artificial sequence
  synthetic sequence
IWFDGSNK

SEQ ID NO: 1081 - protein, 8 aa, Artificial sequence
  synthetic sequence
ISYDGGKT

SEQ ID NO: 1082 - protein, 8 aa, Artificial sequence
  synthetic sequence
ISASGGST

SEQ ID NO: 1083 - protein, 8 aa, Artificial sequence
  synthetic sequence
INPSGGRT

SEQ ID NO: 1084 - protein, 7 aa, Artificial sequence
  synthetic sequence
IVGSANT

SEQ ID NO: 1085 - protein, 8 aa, Artificial sequence
  synthetic sequence
IHPENGNT

SEQ ID NO: 1086 - protein, 8 aa, Artificial sequence
  synthetic sequence
ISYDGSTQ

SEQ ID NO: 1087 - protein, 8 aa, Artificial sequence
  synthetic sequence
ISFDGSNK

SEQ ID NO: 1088 - protein, 8 aa, Artificial sequence
  synthetic sequence
IKVDGSEE

SEQ ID NO: 1089 - protein, 8 aa, Artificial sequence
  synthetic sequence
MSPDSGNT

SEQ ID NO: 1090 - protein, 8 aa, Artificial sequence
  synthetic sequence
IIPMFHTL

SEQ ID NO: 1091 - protein, 7 aa, Artificial sequence
  synthetic sequence
INRSGST

SEQ ID NO: 1092 - protein, 8 aa, Artificial sequence
  synthetic sequence
INPNSGGT

SEQ ID NO: 1093 - protein, 7 aa, Artificial sequence
  synthetic sequence
IYHSGSL

SEQ ID NO: 1094 - protein, 7 aa, Artificial sequence
  synthetic sequence
IYSSGST

SEQ ID NO: 1095 - protein, 8 aa, Artificial sequence
  synthetic sequence
VSDDGSII

SEQ ID NO: 1096 - protein, 8 aa, Artificial sequence
  synthetic sequence
ISHDGTTT

SEQ ID NO: 1097 - protein, 8 aa, Artificial sequence
  synthetic sequence
ISGSGGTI

SEQ ID NO: 1098 - protein, 7 aa, Artificial sequence
  synthetic sequence
ISAGGDT

SEQ ID NO: 1099 - protein, 7 aa, Artificial sequence
  synthetic sequence
INGRGDS

SEQ ID NO: 1100 - protein, 8 aa, Artificial sequence
  synthetic sequence
IDPSDSYA

SEQ ID NO: 1101 - protein, 8 aa, Artificial sequence
  synthetic sequence
IVPMIDKT

SEQ ID NO: 1102 - protein, 8 aa, Artificial sequence
  synthetic sequence
IKPDGSAR

SEQ ID NO: 1103 - protein, 7 aa, Artificial sequence
  synthetic sequence
ISYGGSA

SEQ ID NO: 1104 - protein, 8 aa, Artificial sequence
  synthetic sequence
IIPILVTP

SEQ ID NO: 1105 - protein, 8 aa, Artificial sequence
  synthetic sequence
ISGYNDRR

SEQ ID NO: 1106 - protein, 7 aa, Artificial sequence
  synthetic sequence
IYRSGST

SEQ ID NO: 1107 - protein, 8 aa, Artificial sequence
  synthetic sequence
IDGSGGST

SEQ ID NO: 1108 - protein, 10 aa, Artificial sequence
  synthetic sequence
IKSKSAGGTT

SEQ ID NO: 1109 - protein, 7 aa, Artificial sequence
  synthetic sequence
IYWDDDK

SEQ ID NO: 1110 - protein, 8 aa, Artificial sequence
  synthetic sequence
VDPSDSYT

SEQ ID NO: 1111 - protein, 8 aa, Artificial sequence
  synthetic sequence
VSVSGDST

SEQ ID NO: 1112 - protein, 8 aa, Artificial sequence
  synthetic sequence
ITSSGAYK

SEQ ID NO: 1113 - protein, 7 aa, Artificial sequence
  synthetic sequence
IFSKDEK

SEQ ID NO: 1114 - protein, 8 aa, Artificial sequence
  synthetic sequence
INSDGSST

SEQ ID NO: 1115 - protein, 7 aa, Artificial sequence
  synthetic sequence
IYFTGNS

SEQ ID NO: 1116 - protein, 8 aa, Artificial sequence
  synthetic sequence
IVVGSSNT

SEQ ID NO: 1117 - protein, 7 aa, Artificial sequence
  synthetic sequence
IHYSGNV

SEQ ID NO: 1118 - protein, 8 aa, Artificial sequence
  synthetic sequence
FDPKDRET

SEQ ID NO: 1119 - protein, 7 aa, Artificial sequence
  synthetic sequence
IYVTETT

SEQ ID NO: 1120 - protein, 8 aa, Artificial sequence
  synthetic sequence
ISAYNGNT

SEQ ID NO: 1121 - protein, 8 aa, Artificial sequence
  synthetic sequence
INTGSANT

SEQ ID NO: 1122 - protein, 8 aa, Artificial sequence
  synthetic sequence
LFPDDSDT

SEQ ID NO: 1123 - protein, 7 aa, Artificial sequence
  synthetic sequence
IFSNDVK

SEQ ID NO: 1124 - protein, 8 aa, Artificial sequence
  synthetic sequence
ISYDGSNT

SEQ ID NO: 1125 - protein, 8 aa, Artificial sequence
  synthetic sequence
ISKDGGTK

SEQ ID NO: 1126 - protein, 5 aa, Artificial sequence
  synthetic sequence
INHSP

SEQ ID NO: 1127 - protein, 8 aa, Artificial sequence
  synthetic sequence
IIPMFGTT

SEQ ID NO: 1128 - protein, 8 aa, Artificial sequence
  synthetic sequence
INRDGDKK

SEQ ID NO: 1129 - protein, 7 aa, Artificial sequence
  synthetic sequence
VNYGGRA

SEQ ID NO: 1130 - protein, 9 aa, Artificial sequence
  synthetic sequence
TYYRSTWST

SEQ ID NO: 1131 - protein, 10 aa, Artificial sequence
  synthetic sequence
LRSKAYGGTT

SEQ ID NO: 1132 - protein, 7 aa, Artificial sequence
  synthetic sequence
IDYSGST

SEQ ID NO: 1133 - protein, 8 aa, Artificial sequence
  synthetic sequence
INRDGTEE

SEQ ID NO: 1134 - protein, 7 aa, Artificial sequence
  synthetic sequence
IYFSGST

SEQ ID NO: 1135 - protein, 7 aa, Artificial sequence
  synthetic sequence
INESGST

SEQ ID NO: 1136 - protein, 8 aa, Artificial sequence
  synthetic sequence
ISAYTGKT

SEQ ID NO: 1137 - protein, 8 aa, Artificial sequence
  synthetic sequence
ISGSGGST

SEQ ID NO: 1138 - protein, 7 aa, Artificial sequence
  synthetic sequence
IFHSGAL

SEQ ID NO: 1139 - protein, 7 aa, Artificial sequence
  synthetic sequence
IHHSGST

SEQ ID NO: 1140 - protein, 7 aa, Artificial sequence
  synthetic sequence
IEYSGST

SEQ ID NO: 1141 - protein, 8 aa, Artificial sequence
  synthetic sequence
VIGYNGKT

SEQ ID NO: 1142 - protein, 8 aa, Artificial sequence
  synthetic sequence
ISAHNGYT

SEQ ID NO: 1143 - protein, 7 aa, Artificial sequence
  synthetic sequence
IYYSGNS

SEQ ID NO: 1144 - protein, 8 aa, Artificial sequence
  synthetic sequence
IHPGDSET

SEQ ID NO: 1145 - protein, 10 aa, Artificial sequence
  synthetic sequence
TRNKANRYTT

SEQ ID NO: 1146 - protein, 8 aa, Artificial sequence
  synthetic sequence
ISGRNIYT

SEQ ID NO: 1147 - protein, 8 aa, Artificial sequence
  synthetic sequence
IYPGDSDT

SEQ ID NO: 1148 - protein, 8 aa, Artificial sequence
  synthetic sequence
IIPLFGTA

SEQ ID NO: 1149 - protein, 8 aa, Artificial sequence
  synthetic sequence
IYPGDSHT

SEQ ID NO: 1150 - protein, 8 aa, Artificial sequence
  synthetic sequence
IIPMFHTS

SEQ ID NO: 1151 - protein, 8 aa, Artificial sequence
  synthetic sequence
MSYDEIKE

SEQ ID NO: 1152 - protein, 8 aa, Artificial sequence
  synthetic sequence
VIAYNGKT

SEQ ID NO: 1153 - protein, 8 aa, Artificial sequence
  synthetic sequence
VYPGDSDT

SEQ ID NO: 1154 - protein, 10 aa, Artificial sequence
  synthetic sequence
IRSKSNSYTT

SEQ ID NO: 1155 - protein, 8 aa, Artificial sequence
  synthetic sequence
MNQDGSEK

SEQ ID NO: 1156 - protein, 7 aa, Artificial sequence
  synthetic sequence
VYYTGSA

SEQ ID NO: 1157 - protein, 7 aa, Artificial sequence
  synthetic sequence
ISDSGSI

SEQ ID NO: 1158 - protein, 8 aa, Artificial sequence
  synthetic sequence
ITSNGGST

SEQ ID NO: 1159 - protein, 8 aa, Artificial sequence
  synthetic sequence
ITTSGSTA

SEQ ID NO: 1160 - protein, 8 aa, Artificial sequence
  synthetic sequence
INNSSSYI

SEQ ID NO: 1161 - protein, 8 aa, Artificial sequence
  synthetic sequence
ITSNGDSI

SEQ ID NO: 1162 - protein, 8 aa, Artificial sequence
  synthetic sequence
IDTSGDSI

SEQ ID NO: 1163 - protein, 8 aa, Artificial sequence
  synthetic sequence
INPNSGDT

SEQ ID NO: 1164 - protein, 8 aa, Artificial sequence
  synthetic sequence
LYRGDYDA

SEQ ID NO: 1165 - protein, 8 aa, Artificial sequence
  synthetic sequence
ISYDGGNK

SEQ ID NO: 1166 - protein, 8 aa, Artificial sequence
  synthetic sequence
VSGSGDSA

SEQ ID NO: 1167 - protein, 8 aa, Artificial sequence
  synthetic sequence
SWVFLVAL

SEQ ID NO: 1168 - protein, 8 aa, Artificial sequence
  synthetic sequence
ISGSGDSA

SEQ ID NO: 1169 - protein, 7 aa, Artificial sequence
  synthetic sequence
IFYTGTT

SEQ ID NO: 1170 - protein, 8 aa, Artificial sequence
  synthetic sequence
ISGYNGDT

SEQ ID NO: 1171 - protein, 8 aa, Artificial sequence
  synthetic sequence
VNPNSGDT

SEQ ID NO: 1172 - protein, 8 aa, Artificial sequence
  synthetic sequence
ISSSSSYI

SEQ ID NO: 1173 - protein, 8 aa, Artificial sequence
  synthetic sequence
MNSEGSSI

SEQ ID NO: 1174 - protein, 7 aa, Artificial sequence
  synthetic sequence
IYYSGAT

SEQ ID NO: 1175 - protein, 8 aa, Artificial sequence
  synthetic sequence
FSATSGDS

SEQ ID NO: 1176 - protein, 8 aa, Artificial sequence
  synthetic sequence
IGYDGSNK

SEQ ID NO: 1177 - protein, 8 aa, Artificial sequence
  synthetic sequence
ISSSGNYI

SEQ ID NO: 1178 - protein, 8 aa, Artificial sequence
  synthetic sequence
IWFDGSTK

SEQ ID NO: 1179 - protein, 8 aa, Artificial sequence
  synthetic sequence
ILFDGSNQ

SEQ ID NO: 1180 - protein, 8 aa, Artificial sequence
  synthetic sequence
INPNSGAT

SEQ ID NO: 1181 - protein, 8 aa, Artificial sequence
  synthetic sequence
VNPNSGGT

SEQ ID NO: 1182 - protein, 8 aa, Artificial sequence
  synthetic sequence
ISTYNGNT

SEQ ID NO: 1183 - protein, 8 aa, Artificial sequence
  synthetic sequence
ISRSGGSA

SEQ ID NO: 1184 - protein, 7 aa, Artificial sequence
  synthetic sequence
IYYSGIA

SEQ ID NO: 1185 - protein, 8 aa, Artificial sequence
  synthetic sequence
ISGSGDST

SEQ ID NO: 1186 - protein, 7 aa, Artificial sequence
  synthetic sequence
FYDTGST

SEQ ID NO: 1187 - protein, 8 aa, Artificial sequence
  synthetic sequence
ISGSGGAT

SEQ ID NO: 1188 - protein, 8 aa, Artificial sequence
  synthetic sequence
ISASGSST

SEQ ID NO: 1189 - protein, 7 aa, Artificial sequence
  synthetic sequence
IYYASST

SEQ ID NO: 1190 - protein, 8 aa, Artificial sequence
  synthetic sequence
IGYDGRIT

SEQ ID NO: 1191 - protein, 8 aa, Artificial sequence
  synthetic sequence
IRDDGGST

SEQ ID NO: 1192 - protein, 8 aa, Artificial sequence
  synthetic sequence
INPSGDTT

SEQ ID NO: 1193 - protein, 7 aa, Artificial sequence
  synthetic sequence
VYYSGST

SEQ ID NO: 1194 - protein, 8 aa, Artificial sequence
  synthetic sequence
INPNSGHT

SEQ ID NO: 1195 - protein, 8 aa, Artificial sequence
  synthetic sequence
ITGSGDSA

SEQ ID NO: 1196 - protein, 8 aa, Artificial sequence
  synthetic sequence
IWHDGFNK

SEQ ID NO: 1197 - protein, 7 aa, Artificial sequence
  synthetic sequence
LYYSERT

SEQ ID NO: 1198 - protein, 8 aa, Artificial sequence
  synthetic sequence
IGWHSGTI

SEQ ID NO: 1199 - protein, 8 aa, Artificial sequence
  synthetic sequence
ISRIGDNT

SEQ ID NO: 1200 - protein, 7 aa, Artificial sequence
  synthetic sequence
IYTRGTT

SEQ ID NO: 1201 - protein, 8 aa, Artificial sequence
  synthetic sequence
ISNSGGST

SEQ ID NO: 1202 - protein, 7 aa, Artificial sequence
  synthetic sequence
FYTRVTT

SEQ ID NO: 1203 - protein, 8 aa, Artificial sequence
  synthetic sequence
VDGSGAST

SEQ ID NO: 1204 - protein, 8 aa, Artificial sequence
  synthetic sequence
ISGSGDTT

SEQ ID NO: 1205 - protein, 8 aa, Artificial sequence
  synthetic sequence
ISRIGDNI

SEQ ID NO: 1206 - protein, 8 aa, Artificial sequence
  synthetic sequence
ISRFGDNT

SEQ ID NO: 1207 - protein, 7 aa, Artificial sequence
  synthetic sequence
INDSGGP

SEQ ID NO: 1208 - protein, 7 aa, Artificial sequence
  synthetic sequence
IYWNDVK

SEQ ID NO: 1209 - protein, 8 aa, Artificial sequence
  synthetic sequence
VDGSGVST

SEQ ID NO: 1210 - protein, 8 aa, Artificial sequence
  synthetic sequence
MYPGDSDT

SEQ ID NO: 1211 - protein, 7 aa, Artificial sequence
  synthetic sequence
INDSGST

SEQ ID NO: 1212 - protein, 7 aa, Artificial sequence
  synthetic sequence
IDHSGST

SEQ ID NO: 1213 - protein, 8 aa, Artificial sequence
  synthetic sequence
ISGSGETT

SEQ ID NO: 1214 - protein, 7 aa, Artificial sequence
  synthetic sequence
VNHSGST

SEQ ID NO: 1215 - protein, 8 aa, Artificial sequence
  synthetic sequence
IDPSDSFT

SEQ ID NO: 1216 - protein, 7 aa, Artificial sequence
  synthetic sequence
IDHYGRT

SEQ ID NO: 1217 - protein, 8 aa, Artificial sequence
  synthetic sequence
ISTTGSTI

SEQ ID NO: 1218 - protein, 8 aa, Artificial sequence
  synthetic sequence
ISRIGDNA

SEQ ID NO: 1219 - protein, 8 aa, Artificial sequence
  synthetic sequence
ISPIGDNT

SEQ ID NO: 1220 - protein, 7 aa, Artificial sequence
  synthetic sequence
VHYSGST

SEQ ID NO: 1221 - protein, 8 aa, Artificial sequence
  synthetic sequence
INQDGSQK

SEQ ID NO: 1222 - protein, 7 aa, Artificial sequence
  synthetic sequence
IYWNDFK

SEQ ID NO: 1223 - protein, 7 aa, Artificial sequence
  synthetic sequence
IYTGGNT

SEQ ID NO: 1224 - protein, 7 aa, Artificial sequence
  synthetic sequence
VYFSGTT

SEQ ID NO: 1225 - protein, 8 aa, Artificial sequence
  synthetic sequence
ISAYNANT

SEQ ID NO: 1226 - protein, 8 aa, Artificial sequence
  synthetic sequence
ISYDGANI

SEQ ID NO: 1227 - protein, 8 aa, Artificial sequence
  synthetic sequence
ISLIGDKT

SEQ ID NO: 1228 - protein, 8 aa, Artificial sequence
  synthetic sequence
ITVYNGNT

SEQ ID NO: 1229 - protein, 8 aa, Artificial sequence
  synthetic sequence
ISLIGDNT

SEQ ID NO: 1230 - protein, 7 aa, Artificial sequence
  synthetic sequence
INHREKT

SEQ ID NO: 1231 - protein, 8 aa, Artificial sequence
  synthetic sequence
INPHTGGK

SEQ ID NO: 1232 - protein, 7 aa, Artificial sequence
  synthetic sequence
INHNENT

SEQ ID NO: 1233 - protein, 7 aa, Artificial sequence
  synthetic sequence
IFSSGEK

SEQ ID NO: 1234 - protein, 8 aa, Artificial sequence
  synthetic sequence
ISGDNGNT

SEQ ID NO: 1235 - protein, 8 aa, Artificial sequence
  synthetic sequence
INPYSGGT

SEQ ID NO: 1236 - protein, 7 aa, Artificial sequence
  synthetic sequence
INQSGST

SEQ ID NO: 1237 - protein, 8 aa, Artificial sequence
  synthetic sequence
INIDGSDT

SEQ ID NO: 1238 - protein, 7 aa, Artificial sequence
  synthetic sequence
ISHSGNT

SEQ ID NO: 1239 - protein, 8 aa, Artificial sequence
  synthetic sequence
IIPTVGNT

SEQ ID NO: 1240 - protein, 8 aa, Artificial sequence
  synthetic sequence
INTDGSRT

SEQ ID NO: 1241 - protein, 8 aa, Artificial sequence
  synthetic sequence
ISGSGSRT

SEQ ID NO: 1242 - protein, 7 aa, Artificial sequence
  synthetic sequence
IFSNDGK

SEQ ID NO: 1243 - protein, 8 aa, Artificial sequence
  synthetic sequence
ISSDGNDK

SEQ ID NO: 1244 - protein, 8 aa, Artificial sequence
  synthetic sequence
IAYDGTNR

SEQ ID NO: 1245 - protein, 8 aa, Artificial sequence
  synthetic sequence
VSFDGSSQ

SEQ ID NO: 1246 - protein, 8 aa, Artificial sequence
  synthetic sequence
ISRVGDNT

SEQ ID NO: 1247 - protein, 8 aa, Artificial sequence
  synthetic sequence
ISGTNGYT

SEQ ID NO: 1248 - protein, 7 aa, Artificial sequence
  synthetic sequence
INNWGNT

SEQ ID NO: 1249 - protein, 8 aa, Artificial sequence
  synthetic sequence
INLNSGGT

SEQ ID NO: 1250 - protein, 8 aa, Artificial sequence
  synthetic sequence
ISPSGTNI

SEQ ID NO: 1251 - protein, 10 aa, Artificial sequence
  synthetic sequence
IKSKSDGGTT

SEQ ID NO: 1252 - protein, 8 aa, Artificial sequence
  synthetic sequence
VNPRRGTA

SEQ ID NO: 1253 - protein, 7 aa, Artificial sequence
  synthetic sequence
IHSDGGT

SEQ ID NO: 1254 - protein, 7 aa, Artificial sequence
  synthetic sequence
INQSGRT

SEQ ID NO: 1255 - protein, 8 aa, Artificial sequence
  synthetic sequence
ISSSSRYI

SEQ ID NO: 1256 - protein, 8 aa, Artificial sequence
  synthetic sequence
LHAYTDTI

SEQ ID NO: 1257 - protein, 8 aa, Artificial sequence
  synthetic sequence
INPKSGDT

SEQ ID NO: 1258 - protein, 7 aa, Artificial sequence
  synthetic sequence
ISGSGRT

SEQ ID NO: 1259 - protein, 7 aa, Artificial sequence
  synthetic sequence
APNNGDT

SEQ ID NO: 1260 - protein, 7 aa, Artificial sequence
  synthetic sequence
IYSGGTT

SEQ ID NO: 1261 - protein, 7 aa, Artificial sequence
  synthetic sequence
TYHIGST

SEQ ID NO: 1262 - protein, 7 aa, Artificial sequence
  synthetic sequence
IYHSGHT

SEQ ID NO: 1263 - protein, 7 aa, Artificial sequence
  synthetic sequence
IYYDGST

SEQ ID NO: 1264 - protein, 7 aa, Artificial sequence
  synthetic sequence
IRYSGST

SEQ ID NO: 1265 - protein, 8 aa, Artificial sequence
  synthetic sequence
VKEDGSEQ

SEQ ID NO: 1266 - protein, 10 aa, Artificial sequence
  synthetic sequence
IMSENDGGAI

SEQ ID NO: 1267 - protein, 7 aa, Artificial sequence
  synthetic sequence
IDWNDDK

SEQ ID NO: 1268 - protein, 8 aa, Artificial sequence
  synthetic sequence
IREDGSER

SEQ ID NO: 1269 - protein, 8 aa, Artificial sequence
  synthetic sequence
IKEDGNEK

SEQ ID NO: 1270 - protein, 8 aa, Artificial sequence
  synthetic sequence
ISGTGGST

SEQ ID NO: 1271 - protein, 7 aa, Artificial sequence
  synthetic sequence
INYSGNT

SEQ ID NO: 1272 - protein, 7 aa, Artificial sequence
  synthetic sequence
IYESGST

SEQ ID NO: 1273 - protein, 8 aa, Artificial sequence
  synthetic sequence
IKQDGSET

SEQ ID NO: 1274 - protein, 8 aa, Artificial sequence
  synthetic sequence
INQDGSEK

SEQ ID NO: 1275 - protein, 7 aa, Artificial sequence
  synthetic sequence
IYHSGSV

SEQ ID NO: 1276 - protein, 8 aa, Artificial sequence
  synthetic sequence
IKGDGSEA

SEQ ID NO: 1277 - protein, 8 aa, Artificial sequence
  synthetic sequence
IKRDGSEK

SEQ ID NO: 1278 - protein, 7 aa, Artificial sequence
  synthetic sequence
VYYTGST

SEQ ID NO: 1279 - protein, 7 aa, Artificial sequence
  synthetic sequence
VNRIGNT

SEQ ID NO: 1280 - protein, 7 aa, Artificial sequence
  synthetic sequence
IYYLGST

SEQ ID NO: 1281 - protein, 8 aa, Artificial sequence
  synthetic sequence
IDSSSDTM

SEQ ID NO: 1282 - protein, 7 aa, Artificial sequence
  synthetic sequence
VDWDGDT

SEQ ID NO: 1283 - protein, 8 aa, Artificial sequence
  synthetic sequence
ISVGGTST

SEQ ID NO: 1284 - protein, 7 aa, Artificial sequence
  synthetic sequence
VYYSGNT

SEQ ID NO: 1285 - protein, 8 aa, Artificial sequence
  synthetic sequence
INPSDGST

SEQ ID NO: 1286 - protein, 7 aa, Artificial sequence
  synthetic sequence
IYHVGST

SEQ ID NO: 1287 - protein, 7 aa, Artificial sequence
  synthetic sequence
IYYTGTT

SEQ ID NO: 1288 - protein, 7 aa, Artificial sequence
  synthetic sequence
INPDGST

SEQ ID NO: 1289 - protein, 7 aa, Artificial sequence
  synthetic sequence
IDWDNHK

SEQ ID NO: 1290 - protein, 7 aa, Artificial sequence
  synthetic sequence
IHYSGST

SEQ ID NO: 1291 - protein, 7 aa, Artificial sequence
  synthetic sequence
IYHSEIT

SEQ ID NO: 1292 - protein, 7 aa, Artificial sequence
  synthetic sequence
MFLSGST

SEQ ID NO: 1293 - protein, 8 aa, Artificial sequence
  synthetic sequence
INSSGGST

SEQ ID NO: 1294 - protein, 8 aa, Artificial sequence
  synthetic sequence
LSGSGGST

SEQ ID NO: 1295 - protein, 8 aa, Artificial sequence
  synthetic sequence
ISVYNGNT

SEQ ID NO: 1296 - protein, 8 aa, Artificial sequence
  synthetic sequence
IIPIFDTT

SEQ ID NO: 1297 - protein, 7 aa, Artificial sequence
  synthetic sequence
VYETGST

SEQ ID NO: 1298 - protein, 7 aa, Artificial sequence
  synthetic sequence
IYHDGTA

SEQ ID NO: 1299 - protein, 8 aa, Artificial sequence
  synthetic sequence
ISSSDDNR

SEQ ID NO: 1300 - protein, 8 aa, Artificial sequence
  synthetic sequence
IDQAGTVV

SEQ ID NO: 1301 - protein, 8 aa, Artificial sequence
  synthetic sequence
INPDGGGT

SEQ ID NO: 1302 - protein, 8 aa, Artificial sequence
  synthetic sequence
ISGPTGST

SEQ ID NO: 1303 - protein, 8 aa, Artificial sequence
  synthetic sequence
ISAYNGYT

SEQ ID NO: 1304 - protein, 8 aa, Artificial sequence
  synthetic sequence
IIPIYDTV

SEQ ID NO: 1305 - protein, 8 aa, Artificial sequence
  synthetic sequence
LSAGGGAT

SEQ ID NO: 1306 - protein, 7 aa, Artificial sequence
  synthetic sequence
VYYIGNS

SEQ ID NO: 1307 - protein, 7 aa, Artificial sequence
  synthetic sequence
INWDDDE

SEQ ID NO: 1308 - protein, 7 aa, Artificial sequence
  synthetic sequence
IFGDGET

SEQ ID NO: 1309 - protein, 8 aa, Artificial sequence
  synthetic sequence
ISGGDHST

SEQ ID NO: 1310 - protein, 7 aa, Artificial sequence
  synthetic sequence
ISPFGTS

SEQ ID NO: 1311 - protein, 7 aa, Artificial sequence
  synthetic sequence
IYWNDDE

SEQ ID NO: 1312 - protein, 7 aa, Artificial sequence
  synthetic sequence
IYYIGST

SEQ ID NO: 1313 - protein, 7 aa, Artificial sequence
  synthetic sequence
VYHTGST

SEQ ID NO: 1314 - protein, 7 aa, Artificial sequence
  synthetic sequence
IHHRGRT

SEQ ID NO: 1315 - protein, 7 aa, Artificial sequence
  synthetic sequence
IFYTGNT

SEQ ID NO: 1316 - protein, 7 aa, Artificial sequence
  synthetic sequence
IYNSGNT

SEQ ID NO: 1317 - protein, 7 aa, Artificial sequence
  synthetic sequence
VSRSGTS

SEQ ID NO: 1318 - protein, 8 aa, Artificial sequence
  synthetic sequence
ITSSGSTI

SEQ ID NO: 1319 - protein, 7 aa, Artificial sequence
  synthetic sequence
IYNNGNT

SEQ ID NO: 1320 - protein, 7 aa, Artificial sequence
  synthetic sequence
SFSNDEK

SEQ ID NO: 1321 - protein, 7 aa, Artificial sequence
  synthetic sequence
IYWSDDQ

SEQ ID NO: 1322 - protein, 7 aa, Artificial sequence
  synthetic sequence
ISHSVST

SEQ ID NO: 1323 - protein, 7 aa, Artificial sequence
  synthetic sequence
VHYTGST

SEQ ID NO: 1324 - protein, 7 aa, Artificial sequence
  synthetic sequence
LYTTGQT

SEQ ID NO: 1325 - protein, 8 aa, Artificial sequence
  synthetic sequence
IKQDGGEK

SEQ ID NO: 1326 - protein, 8 aa, Artificial sequence
  synthetic sequence
INEDGSEE

SEQ ID NO: 1327 - protein, 8 aa, Artificial sequence
  synthetic sequence
IWFDESNK

SEQ ID NO: 1328 - protein, 7 aa, Artificial sequence
  synthetic sequence
INYSGTT

SEQ ID NO: 1329 - protein, 8 aa, Artificial sequence
  synthetic sequence
ISGGGGSI

SEQ ID NO: 1330 - protein, 7 aa, Artificial sequence
  synthetic sequence
IDDSTYT

SEQ ID NO: 1331 - protein, 7 aa, Artificial sequence
  synthetic sequence
IYWNDEN

SEQ ID NO: 1332 - protein, 7 aa, Artificial sequence
  synthetic sequence
IYTSGNT

SEQ ID NO: 1333 - protein, 8 aa, Artificial sequence
  synthetic sequence
ISYDGRNK

SEQ ID NO: 1334 - protein, 7 aa, Artificial sequence
  synthetic sequence
ISYGGVT

SEQ ID NO: 1335 - protein, 7 aa, Artificial sequence
  synthetic sequence
IYYSGTT

SEQ ID NO: 1336 - protein, 8 aa, Artificial sequence
  synthetic sequence
ISGSGGDT

SEQ ID NO: 1337 - protein, 7 aa, Artificial sequence
  synthetic sequence
VISSGHT

SEQ ID NO: 1338 - protein, 7 aa, Artificial sequence
  synthetic sequence
VYYSANT

SEQ ID NO: 1339 - protein, 7 aa, Artificial sequence
  synthetic sequence
IVSNDEK

SEQ ID NO: 1340 - protein, 7 aa, Artificial sequence
  synthetic sequence
ICCGGST

SEQ ID NO: 1341 - protein, 7 aa, Artificial sequence
  synthetic sequence
MFHSGAT

SEQ ID NO: 1342 - protein, 7 aa, Artificial sequence
  synthetic sequence
IFSTDEK

SEQ ID NO: 1343 - protein, 7 aa, Artificial sequence
  synthetic sequence
TYWNDDE

SEQ ID NO: 1344 - protein, 7 aa, Artificial sequence
  synthetic sequence
IYFSGTT

SEQ ID NO: 1345 - protein, 7 aa, Artificial sequence
  synthetic sequence
IYLSGRT

SEQ ID NO: 1346 - protein, 8 aa, Artificial sequence
  synthetic sequence
INQDGGEE

SEQ ID NO: 1347 - protein, 8 aa, Artificial sequence
  synthetic sequence
ISGSGDNT

SEQ ID NO: 1348 - protein, 8 aa, Artificial sequence
  synthetic sequence
IKHDGSEK

SEQ ID NO: 1349 - protein, 8 aa, Artificial sequence
  synthetic sequence
INPYNDNT

SEQ ID NO: 1350 - protein, 7 aa, Artificial sequence
  synthetic sequence
IDWDDHK

SEQ ID NO: 1351 - protein, 8 aa, Artificial sequence
  synthetic sequence
ISDSGVNT

SEQ ID NO: 1352 - protein, 7 aa, Artificial sequence
  synthetic sequence
IYNSAST

SEQ ID NO: 1353 - protein, 8 aa, Artificial sequence
  synthetic sequence
IDPSDSST

SEQ ID NO: 1354 - protein, 8 aa, Artificial sequence
  synthetic sequence
ISSSGTTT

SEQ ID NO: 1355 - protein, 10 aa, Artificial sequence
  synthetic sequence
IGSSAYDGTT

SEQ ID NO: 1356 - protein, 7 aa, Artificial sequence
  synthetic sequence
IYYSGSS

SEQ ID NO: 1357 - protein, 7 aa, Artificial sequence
  synthetic sequence
IYNSWST

SEQ ID NO: 1358 - protein, 7 aa, Artificial sequence
  synthetic sequence
IYFLGST

SEQ ID NO: 1359 - protein, 7 aa, Artificial sequence
  synthetic sequence
IYNSATT

SEQ ID NO: 1360 - protein, 7 aa, Artificial sequence
  synthetic sequence
IYWNDDR

SEQ ID NO: 1361 - protein, 8 aa, Artificial sequence
  synthetic sequence
ISGKGDRT

SEQ ID NO: 1362 - protein, 7 aa, Artificial sequence
  synthetic sequence
FYSSGNT

SEQ ID NO: 1363 - protein, 8 aa, Artificial sequence
  synthetic sequence
IKQDGSEN

SEQ ID NO: 1364 - protein, 7 aa, Artificial sequence
  synthetic sequence
IHSSGSS

SEQ ID NO: 1365 - protein, 7 aa, Artificial sequence
  synthetic sequence
IYWDGDE

SEQ ID NO: 1366 - protein, 7 aa, Artificial sequence
  synthetic sequence
TGTAGDA

SEQ ID NO: 1367 - protein, 7 aa, Artificial sequence
  synthetic sequence
IFYSGNT

SEQ ID NO: 1368 - protein, 7 aa, Artificial sequence
  synthetic sequence
IYTGGQT

SEQ ID NO: 1369 - protein, 7 aa, Artificial sequence
  synthetic sequence
MYYTGSA

SEQ ID NO: 1370 - protein, 7 aa, Artificial sequence
  synthetic sequence
LYYTGST

SEQ ID NO: 1371 - protein, 7 aa, Artificial sequence
  synthetic sequence
LYYSGHT

SEQ ID NO: 1372 - protein, 7 aa, Artificial sequence
  synthetic sequence
IYTDGST

SEQ ID NO: 1373 - protein, 8 aa, Artificial sequence
  synthetic sequence
ISGYNGNT

SEQ ID NO: 1374 - protein, 8 aa, Artificial sequence
  synthetic sequence
VGPSGTST

SEQ ID NO: 1375 - protein, 7 aa, Artificial sequence
  synthetic sequence
IYYSGVT

SEQ ID NO: 1376 - protein, 7 aa, Artificial sequence
  synthetic sequence
IYQSGTI

SEQ ID NO: 1377 - protein, 7 aa, Artificial sequence
  synthetic sequence
ILSNDEK

SEQ ID NO: 1378 - protein, 7 aa, Artificial sequence
  synthetic sequence
IYSDGST

SEQ ID NO: 1379 - protein, 7 aa, Artificial sequence
  synthetic sequence
IYFIGIT

SEQ ID NO: 1380 - protein, 6 aa, Artificial sequence
  synthetic sequence
IYRGST

SEQ ID NO: 1381 - protein, 10 aa, Artificial sequence
  synthetic sequence
IKTNTDGGTT

SEQ ID NO: 1382 - protein, 7 aa, Artificial sequence
  synthetic sequence
IDGDNDK

SEQ ID NO: 1383 - protein, 7 aa, Artificial sequence
  synthetic sequence
IYYSGQT

SEQ ID NO: 1384 - protein, 8 aa, Artificial sequence
  synthetic sequence
TINNGATT

SEQ ID NO: 1385 - protein, 8 aa, Artificial sequence
  synthetic sequence
ITWNSAII

SEQ ID NO: 1386 - protein, 8 aa, Artificial sequence
  synthetic sequence
IKEDGTEK

SEQ ID NO: 1387 - protein, 7 aa, Artificial sequence
  synthetic sequence
IYHSGTT

SEQ ID NO: 1388 - protein, 10 aa, Artificial sequence
  synthetic sequence
IRSNAYGATR

SEQ ID NO: 1389 - protein, 8 aa, Artificial sequence
  synthetic sequence
IKSDGSET

SEQ ID NO: 1390 - protein, 7 aa, Artificial sequence
  synthetic sequence
IFRSGST

SEQ ID NO: 1391 - protein, 7 aa, Artificial sequence
  synthetic sequence
MYYIRNT

SEQ ID NO: 1392 - protein, 7 aa, Artificial sequence
  synthetic sequence
FYYSGST

SEQ ID NO: 1393 - protein, 8 aa, Artificial sequence
  synthetic sequence
IIPVFGTI

SEQ ID NO: 1394 - protein, 7 aa, Artificial sequence
  synthetic sequence
IDWDDAK

SEQ ID NO: 1395 - protein, 7 aa, Artificial sequence
  synthetic sequence
IYTSGTT

SEQ ID NO: 1396 - protein, 7 aa, Artificial sequence
  synthetic sequence
IDSAGST

SEQ ID NO: 1397 - protein, 7 aa, Artificial sequence
  synthetic sequence
INRLGST

SEQ ID NO: 1398 - protein, 8 aa, Artificial sequence
  synthetic sequence
IDPAGSDT

SEQ ID NO: 1399 - protein, 7 aa, Artificial sequence
  synthetic sequence
IYSNGNT

SEQ ID NO: 1400 - protein, 9 aa, Artificial sequence
  synthetic sequence
TYYNSKWYS

SEQ ID NO: 1401 - protein, 8 aa, Artificial sequence
  synthetic sequence
INQDGIEK

SEQ ID NO: 1402 - protein, 8 aa, Artificial sequence
  synthetic sequence
IWYDGGNK

SEQ ID NO: 1403 - protein, 17 aa, Artificial sequence
  synthetic sequence
CTGHTSSFDYYYGMDVW

SEQ ID NO: 1404 - protein, 22 aa, Artificial sequence
  synthetic sequence
CAKWLYYGSGSYYFYYYGMDVW

SEQ ID NO: 1405 - protein, 16 aa, Artificial sequence
  synthetic sequence
CAKPGYSGYDFGLGYW

SEQ ID NO: 1406 - protein, 17 aa, Artificial sequence
  synthetic sequence
CAPSPAVVAGAMDNDPW

SEQ ID NO: 1407 - protein, 16 aa, Artificial sequence
  synthetic sequence
CARVDYDFWSGFYDSW

SEQ ID NO: 1408 - protein, 17 aa, Artificial sequence
  synthetic sequence
CARELWSGSPDYYFDSW

SEQ ID NO: 1409 - protein, 12 aa, Artificial sequence
  synthetic sequence
CARERYRNSDVW

SEQ ID NO: 1410 - protein, 14 aa, Artificial sequence
  synthetic sequence
CARGRLDRNWFDPW

SEQ ID NO: 1411 - protein, 17 aa, Artificial sequence
  synthetic sequence
CARVMGATKWNDAFDIW

SEQ ID NO: 1412 - protein, 17 aa, Artificial sequence
  synthetic sequence
CARELWSGYTDYYFDSW

SEQ ID NO: 1413 - protein, 12 aa, Artificial sequence
  synthetic sequence
CANSDWGAYDSW

SEQ ID NO: 1414 - protein, 16 aa, Artificial sequence
  synthetic sequence
CARVNNDFWSGFYDSW

SEQ ID NO: 1415 - protein, 11 aa, Artificial sequence
  synthetic sequence
CGRGGYSFDYW

SEQ ID NO: 1416 - protein, 16 aa, Artificial sequence
  synthetic sequence
CARVDNDFWSGFYDSW

SEQ ID NO: 1417 - protein, 16 aa, Artificial sequence
  synthetic sequence
CARVDYDFWSGFCDSW

SEQ ID NO: 1418 - protein, 16 aa, Artificial sequence
  synthetic sequence
CARRACSSISCYVDYW

SEQ ID NO: 1419 - protein, 17 aa, Artificial sequence
  synthetic sequence
CVRDLRQRLVDDDFDMW

SEQ ID NO: 1420 - protein, 16 aa, Artificial sequence
  synthetic sequence
CVTAGVNSNYYGMDVW

SEQ ID NO: 1421 - protein, 17 aa, Artificial sequence
  synthetic sequence
CARIIPLNYLGGPFDSW

SEQ ID NO: 1422 - protein, 15 aa, Artificial sequence
  synthetic sequence
CARVSTSKWGHFAYW

SEQ ID NO: 1423 - protein, 21 aa, Artificial sequence
  synthetic sequence
CARGPSRGWSGRSGNNWFDPW

SEQ ID NO: 1424 - protein, 19 aa, Artificial sequence
  synthetic sequence
CARRAQYSGSSPYWYFDFW

SEQ ID NO: 1425 - protein, 17 aa, Artificial sequence
  synthetic sequence
CAKDYYDSGGFYIFDSW

SEQ ID NO: 1426 - protein, 20 aa, Artificial sequence
  synthetic sequence
CARDHGDYTLHSFYYGMDVW

SEQ ID NO: 1427 - protein, 12 aa, Artificial sequence
  synthetic sequence
CARNRAAAGDYW

SEQ ID NO: 1428 - protein, 18 aa, Artificial sequence
  synthetic sequence
CARGTVSGYDLKVSFDYW

SEQ ID NO: 1429 - protein, 21 aa, Artificial sequence
  synthetic sequence
CARDVGYCSDPSCYADWFDPW

SEQ ID NO: 1430 - protein, 13 aa, Artificial sequence
  synthetic sequence
CARARQPQHLDYW

SEQ ID NO: 1431 - protein, 16 aa, Artificial sequence
  synthetic sequence
CVRDGGDTVTRAYDFW

SEQ ID NO: 1432 - protein, 19 aa, Artificial sequence
  synthetic sequence
CARENSAYDWGRGRVFDYW

SEQ ID NO: 1433 - protein, 15 aa, Artificial sequence
  synthetic sequence
CARVSSSKWGHFAYW

SEQ ID NO: 1434 - protein, 14 aa, Artificial sequence
  synthetic sequence
CARIRGPYDAFDIW

SEQ ID NO: 1435 - protein, 21 aa, Artificial sequence
  synthetic sequence
CARHLKDPSIAVLIENTFDIW

SEQ ID NO: 1436 - protein, 17 aa, Artificial sequence
  synthetic sequence
CATIIPLNYLGGPFDSW

SEQ ID NO: 1437 - protein, 20 aa, Artificial sequence
  synthetic sequence
CARRYYNFWSGYTRNWFDPW

SEQ ID NO: 1438 - protein, 19 aa, Artificial sequence
  synthetic sequence
CAHRRDTIIRGVADAFNFW

SEQ ID NO: 1439 - protein, 19 aa, Artificial sequence
  synthetic sequence
CARDSLAAAGFTTYYFDYW

SEQ ID NO: 1440 - protein, 14 aa, Artificial sequence [sequence omitted]

SEQ ID NO: 1441 - protein, 15 aa, Artificial sequence
  synthetic sequence
CVRDFVPNSNWLDPW

SEQ ID NO: 1442 - protein, 22 aa, Artificial sequence
  synthetic sequence
CARGFIGYDTDGRDVAANLDSW

SEQ ID NO: 1443 - protein, 19 aa, Artificial sequence
  synthetic sequence
CARVQYNSGSYFRDYYDFW

SEQ ID NO: 1444 - protein, 14 aa, Artificial sequence
  synthetic sequence
CAKDQWELVVFDYW

SEQ ID NO: 1445 - protein, 15 aa, Artificial sequence
  synthetic sequence
CAVCVTAVHDAFDLW

SEQ ID NO: 1446 - protein, 17 aa, Artificial sequence
  synthetic sequence
CARDFRAGNIKGEFDPW

SEQ ID NO: 1447 - protein, 24 aa, Artificial sequence
  synthetic sequence
CARAERTHYYESGEFRAWTTFDYW

SEQ ID NO: 1448 - protein, 23 aa, Artificial sequence
  synthetic sequence
CARTGYYDFWSGSRPFYCYMDVW

SEQ ID NO: 1449 - protein, 16 aa, Artificial sequence
  synthetic sequence
CARGPDFWNGDHDGYW

SEQ ID NO: 1450 - protein, 24 aa, Artificial sequence
  synthetic sequence
CAHLSLVLRFLEYLPLPYYDMDVW

SEQ ID NO: 1451 - protein, 16 aa, Artificial sequence
  synthetic sequence
CARGGYSVGWYYFHYW

SEQ ID NO: 1452 - protein, 17 aa, Artificial sequence
  synthetic sequence
CARSSYSSGWYGDFDYW

SEQ ID NO: 1453 - protein, 26 aa, Artificial sequence
  synthetic sequence
CARSVLSAKDTGGLYYDYYYYYMDVW

SEQ ID NO: 1454 - protein, 22 aa, Artificial sequence
  synthetic sequence
CAGGEEKSYSHGTFDPDPPVHW

SEQ ID NO: 1455 - protein, 18 aa, Artificial sequence
  synthetic sequence
CARAKTPGDFFYYYMDVW

SEQ ID NO: 1456 - protein, 19 aa, Artificial sequence
  synthetic sequence
CAKGFEGLVLAGDYYMDVW

SEQ ID NO: 1457 - protein, 12 aa, Artificial sequence
  synthetic sequence
CATRFYFDFDYW

SEQ ID NO: 1458 - protein, 15 aa, Artificial sequence
  synthetic sequence
CGKDIGLRWGGIDSW

SEQ ID NO: 1459 - protein, 19 aa, Artificial sequence
  synthetic sequence
CARGPTWIPTTDSYYMDVW

SEQ ID NO: 1460 - protein, 20 aa, Artificial sequence
  synthetic sequence
CARDAGRFRRLRGFPPQDYW

SEQ ID NO: 1461 - protein, 16 aa, Artificial sequence
  synthetic sequence
CAIYSSSSLASYMDVW

SEQ ID NO: 1462 - protein, 17 aa, Artificial sequence
  synthetic sequence
CARALSGSYYVGWFDPW

SEQ ID NO: 1463 - protein, 18 aa, Artificial sequence
  synthetic sequence
CAKIDLATTIGGAPMDVW

SEQ ID NO: 1464 - protein, 16 aa, Artificial sequence
  synthetic sequence
CVRYGAITRLSYLDFW

SEQ ID NO: 1465 - protein, 19 aa, Artificial sequence
  synthetic sequence
CARDYCSSGSCYLGWLDRW

SEQ ID NO: 1466 - protein, 22 aa, Artificial sequence
  synthetic sequence
CARLPTVLRGVPGGGRSSIDVW

SEQ ID NO: 1467 - protein, 16 aa, Artificial sequence
  synthetic sequence
CAKWLMGAERSLTGHW

SEQ ID NO: 1468 - protein, 22 aa, Artificial sequence
  synthetic sequence
CAKGLVYFGWGSPQYYYYMEVW

SEQ ID NO: 1469 - protein, 18 aa, Artificial sequence
  synthetic sequence
CARDWGDYYGSRSSHDYW

SEQ ID NO: 1470 - protein, 12 aa, Artificial sequence
  synthetic sequence
CVREGLNYADVW

SEQ ID NO: 1471 - protein, 24 aa, Artificial sequence
  synthetic sequence
CAREAIYYYDSSGYHTATDAFDMW

SEQ ID NO: 1472 - protein, 16 aa, Artificial sequence
  synthetic sequence
CARLRRWLQPYSFDIW

SEQ ID NO: 1473 - protein, 29 aa, Artificial sequence
  synthetic sequence
CARVGRTLGYCSGGSCETGYEHYYFMDVW

SEQ ID NO: 1474 - protein, 16 aa, Artificial sequence
  synthetic sequence
CARAFVMVTHYYMDVW

SEQ ID NO: 1475 - protein, 19 aa, Artificial sequence
  synthetic sequence
CARDRPAAGTNYYFYIDVW

SEQ ID NO: 1476 - protein, 15 aa, Artificial sequence
  synthetic sequence
CARDRVGAAAPFDYW

SEQ ID NO: 1477 - protein, 25 aa, Artificial sequence
  synthetic sequence
CAKCSARTCYPWEECYHYYYYLDVW

SEQ ID NO: 1478 - protein, 13 aa, Artificial sequence
  synthetic sequence
CARFSPTRLLDYW

SEQ ID NO: 1479 - protein, 19 aa, Artificial sequence
  synthetic sequence
CARENDFWSGDYTGGFDLW

SEQ ID NO: 1480 - protein, 23 aa, Artificial sequence
  synthetic sequence
CAGGSSAHNSGYIYGDIGAFDIW

SEQ ID NO: 1481 - protein, 12 aa, Artificial sequence
  synthetic sequence
CTRRYSGSYSRW

SEQ ID NO: 1482 - protein, 20 aa, Artificial sequence
  synthetic sequence
CARPRRPDLWSGYYDAFDIW

SEQ ID NO: 1483 - protein, 12 aa, Artificial sequence [sequence omitted]

SEQ ID NO: 1484 - protein, 24 aa, Artificial sequence
  synthetic sequence
CVHEQGGWFGQSRTSRYYYYMDVW

SEQ ID NO: 1485 - protein, 17 aa, Artificial sequence
  synthetic sequence
PAIFRVLEYLGGRILDF

SEQ ID NO: 1486 - protein, 19 aa, Artificial sequence
  synthetic sequence
CARDRPSAGTNYYFYIDVW

SEQ ID NO: 1487 - protein, 17 aa, Artificial sequence
  synthetic sequence
CARGLGIVGTTTKLEFW

SEQ ID NO: 1488 - protein, 20 aa, Artificial sequence
  synthetic sequence
CARDVHTIGSGNSRGYMDVW

SEQ ID NO: 1489 - protein, 15 aa, Artificial sequence
  synthetic sequence
CATEAYDTSGGREVW

SEQ ID NO: 1490 - protein, 23 aa, Artificial sequence
  synthetic sequence
CARAPRARTESIAARMGDAFDIW

SEQ ID NO: 1491 - protein, 16 aa, Artificial sequence
  synthetic sequence
CARAPSSSSWGYFDLW

SEQ ID NO: 1492 - protein, 15 aa, Artificial sequence
  synthetic sequence
CARDDGQWSTTWYHW

SEQ ID NO: 1493 - protein, 16 aa, Artificial sequence
  synthetic sequence
CVRESLGSGNRYFELW

SEQ ID NO: 1494 - protein, 21 aa, Artificial sequence
  synthetic sequence
CAKDNWDYYDSSGYYGAFDIW

SEQ ID NO: 1495 - protein, 15 aa, Artificial sequence
  synthetic sequence
CAKTYSRSWAYFDSW

SEQ ID NO: 1496 - protein, 19 aa, Artificial sequence
  synthetic sequence
CARGGITVFGVIVPCLDPW

SEQ ID NO: 1497 - protein, 17 aa, Artificial sequence
  synthetic sequence
CAKPTYEPSGYYGFDIW

SEQ ID NO: 1498 - protein, 23 aa, Artificial sequence
  synthetic sequence
CARTEERRLGEYVYYYYYYMDVW

SEQ ID NO: 1499 - protein, 17 aa, Artificial sequence
  synthetic sequence
CARVWSKGYYSGYFDPW

SEQ ID NO: 1500 - protein, 21 aa, Artificial sequence
  synthetic sequence
CARGLYYYARGKGEIWHFDLW

SEQ ID NO: 1501 - protein, 22 aa, Artificial sequence
  synthetic sequence
CARDMSEQLIPDHYYFYYMDVW

SEQ ID NO: 1502 - protein, 16 aa, Artificial sequence
  synthetic sequence
CVRDLYGDHPWYMDVW

SEQ ID NO: 1503 - protein, 19 aa, Artificial sequence
  synthetic sequence
CAKFLKSEVLNARDYFDDW

SEQ ID NO: 1504 - protein, 11 aa, Artificial sequence
  synthetic sequence
CARGQVWLPYW

SEQ ID NO: 1505 - protein, 16 aa, Artificial sequence
  synthetic sequence
CARGPDFWNGDHDGNW

SEQ ID NO: 1506 - protein, 21 aa, Artificial sequence
  synthetic sequence
CARCPRGGSNFIATGLWFDTW

SEQ ID NO: 1507 - protein, 24 aa, Artificial sequence
  synthetic sequence
CAREWKGDFSGYYSFYYYYYMDVW

SEQ ID NO: 1508 - protein, 25 aa, Artificial sequence
  synthetic sequence
CARAPGSLSYFDNSGHHRADSFDIW

SEQ ID NO: 1509 - protein, 14 aa, Artificial sequence
  synthetic sequence
CARDDGTLTFFDNW

SEQ ID NO: 1510 - protein, 17 aa, Artificial sequence
  synthetic sequence
CVASHLLAVGHLLPDYW

SEQ ID NO: 1511 - protein, 18 aa, Artificial sequence
  synthetic sequence
CARHRGTAGYYYYSMDVW

SEQ ID NO: 1512 - protein, 19 aa, Artificial sequence
  synthetic sequence
CAKDLGGWELPLGNGFDVW

SEQ ID NO: 1513 - protein, 18 aa, Artificial sequence
  synthetic sequence
CAKGRGGDGTSVFYFDYW

SEQ ID NO: 1514 - protein, 21 aa, Artificial sequence
  synthetic sequence
CARLTGEYDFWSGSEYYFDRW

SEQ ID NO: 1515 - protein, 19 aa, Artificial sequence
  synthetic sequence
CVKDIGVGVGAMGVAFEHW

SEQ ID NO: 1516 - protein, 15 aa, Artificial sequence
  synthetic sequence
CARDEGFGSGHFYTW

SEQ ID NO: 1517 - protein, 21 aa, Artificial sequence
  synthetic sequence
CATDRKGLFPNYYYSHHLDVW

SEQ ID NO: 1518 - protein, 18 aa, Artificial sequence
  synthetic sequence
CAKGRGGDGTSVFYFDSW

SEQ ID NO: 1519 - protein, 13 aa, Artificial sequence
  synthetic sequence
CAAYSYANWLDPW

SEQ ID NO: 1520 - protein, 21 aa, Artificial sequence
  synthetic sequence
CARGLGNDHDISGHWGWFDSW

SEQ ID NO: 1521 - protein, 17 aa, Artificial sequence
  synthetic sequence
CARDVGGSDFLSGFDYW

SEQ ID NO: 1522 - protein, 15 aa, Artificial sequence
  synthetic sequence
CGKDIGLRWGGIESW

SEQ ID NO: 1523 - protein, 24 aa, Artificial sequence
  synthetic sequence
CARRWAVKNRGLMGYYYSYYMDVW

SEQ ID NO: 1524 - protein, 19 aa, Artificial sequence
  synthetic sequence
CAKTREFSSGWPGASFDYW

SEQ ID NO: 1525 - protein, 18 aa, Artificial sequence
  synthetic sequence
CAKANPDVTYSFGYMDSW

SEQ ID NO: 1526 - protein, 26 aa, Artificial sequence
  synthetic sequence
CAKVKTPRPNFYNYFLPETEFYFDHW

SEQ ID NO: 1527 - protein, 17 aa, Artificial sequence
  synthetic sequence
CAKGSGRNWNYGAFEYW

SEQ ID NO: 1528 - protein, 19 aa, Artificial sequence
  synthetic sequence
CARDWGIAAAGPYYYMDVW

SEQ ID NO: 1529 - protein, 26 aa, Artificial sequence
  synthetic sequence
CAKVKTPRPNYYNYFLPETEFYFDHW

SEQ ID NO: 1530 - protein, 22 aa, Artificial sequence
  synthetic sequence
CARHVPTLTDGWYLFRSGFDHW

SEQ ID NO: 1531 - protein, 15 aa, Artificial sequence
  synthetic sequence
CARGRYVLPDAFDIW

SEQ ID NO: 1532 - protein, 17 aa, Artificial sequence
  synthetic sequence
CARAPRGFLEEKYFDSW

SEQ ID NO: 1533 - protein, 16 aa, Artificial sequence
  synthetic sequence
CARAWFGEFRGAFDIW

SEQ ID NO: 1534 - protein, 14 aa, Artificial sequence
  synthetic sequence
CARHPLPVYYFDSW

SEQ ID NO: 1535 - protein, 16 aa, Artificial sequence
  synthetic sequence
CAKGVSSGGNTHFDSW

SEQ ID NO: 1536 - protein, 29 aa, Artificial sequence
  synthetic sequence
CARDIETSALYKDVLTGFRYFYFYYMDVW

SEQ ID NO: 1537 - protein, 19 aa, Artificial sequence
  synthetic sequence
CAKGFEGLLLAGDYYMDVW

SEQ ID NO: 1538 - protein, 18 aa, Artificial sequence
  synthetic sequence
CARDQRHCSSSWCPFDHW

SEQ ID NO: 1539 - protein, 20 aa, Artificial sequence
  synthetic sequence
CARDCHVIDYDFWDASFDSW

SEQ ID NO: 1540 - protein, 17 aa, Artificial sequence
  synthetic sequence
CATSIPSTGITGALDLW

SEQ ID NO: 1541 - protein, 18 aa, Artificial sequence
  synthetic sequence
CARAVFLEWLLSSYFDYW

SEQ ID NO: 1542 - protein, 15 aa, Artificial sequence
  synthetic sequence
CVRMYSKGGYPMDYW

SEQ ID NO: 1543 - protein, 19 aa, Artificial sequence
  synthetic sequence
CARDQEAAGGTAGNYFDPW

SEQ ID NO: 1544 - protein, 23 aa, Artificial sequence
  synthetic sequence
CARELPYYDSSGHWSERGGFDLW

SEQ ID NO: 1545 - protein, 21 aa, Artificial sequence
  synthetic sequence
CARGDTYTPSSRYYYYYMDVW

SEQ ID NO: 1546 - protein, 15 aa, Artificial sequence
  synthetic sequence
CAGPSDRYRYYLDVW

SEQ ID NO: 1547 - protein, 18 aa, Artificial sequence
  synthetic sequence
CARGRGLRLEDLASFDSW

SEQ ID NO: 1548 - protein, 23 aa, Artificial sequence
  synthetic sequence
CARAPYDFWGAYLGSYNYYMDVW

SEQ ID NO: 1549 - protein, 17 aa, Artificial sequence
  synthetic sequence
CATRVRVIGRLDASDVW

SEQ ID NO: 1550 - protein, 13 aa, Artificial sequence
  synthetic sequence
CTRTLSYEPPDHW

SEQ ID NO: 1551 - protein, 17 aa, Artificial sequence
  synthetic sequence
CARAVTIFGGVSPPDYW

SEQ ID NO: 1552 - protein, 22 aa, Artificial sequence
  synthetic sequence
CARGHYYDSTGYYLPPYYFDYW

SEQ ID NO: 1553 - protein, 15 aa, Artificial sequence
  synthetic sequence
CAKHQYDLWSAYDYW

SEQ ID NO: 1554 - protein, 17 aa, Artificial sequence
  synthetic sequence
CARGLIAARRLDWFDPW

SEQ ID NO: 1555 - protein, 15 aa, Artificial sequence
  synthetic sequence
CARMDVRLASVLSGW

SEQ ID NO: 1556 - protein, 22 aa, Artificial sequence
  synthetic sequence
CAREDSSSWYPVFYYYYYMDVW

SEQ ID NO: 1557 - protein, 15 aa, Artificial sequence
  synthetic sequence
CVKSPQSGWYYFDSW

SEQ ID NO: 1558 - protein, 23 aa, Artificial sequence
  synthetic sequence
CARPYWRHDRVLRHHLIFLDRPL

SEQ ID NO: 1559 - protein, 21 aa, Artificial sequence
  synthetic sequence
CAILSLEEGYCSSISCSSDYW

SEQ ID NO: 1560 - protein, 16 aa, Artificial sequence
  synthetic sequence
CARGPDFWSGDHDGYW

SEQ ID NO: 1561 - protein, 29 aa, Artificial sequence
  synthetic sequence
CARDDSREERKFDFWRGYRDYYYYYMDVW

SEQ ID NO: 1562 - protein, 18 aa, Artificial sequence
  synthetic sequence
CFRHFYDDRNNLGSLDHW

SEQ ID NO: 1563 - protein, 18 aa, Artificial sequence
  synthetic sequence
CAKTLTRGRRFADGFDIW

SEQ ID NO: 1564 - protein, 14 aa, Artificial sequence
  synthetic sequence
CARGEMGGSPPENW

SEQ ID NO: 1565 - protein, 22 aa, Artificial sequence
  synthetic sequence
CARDSGWLPLGELSFSRYFDYW

SEQ ID NO: 1566 - protein, 27 aa, Artificial sequence
  synthetic sequence
CARLQRRRFGSSSWWAGSDYYYYIDVW

SEQ ID NO: 1567 - protein, 17 aa, Artificial sequence
  synthetic sequence
CARAVSGTYYYYYMDIW

SEQ ID NO: 1568 - protein, 14 aa, Artificial sequence [sequence omitted]

SEQ ID NO: 1569 - protein, 27 aa, Artificial sequence
  synthetic sequence
CAKVLGYCRGDSCYLAMNLEEIAFDIW

SEQ ID NO: 1570 - protein, 15 aa, Artificial sequence
  synthetic sequence
CARAYSSSGTGFDYW

SEQ ID NO: 1571 - protein, 21 aa, Artificial sequence
  synthetic sequence
CARESPEGQSLYYHPYYMDLW

SEQ ID NO: 1572 - protein, 19 aa, Artificial sequence
  synthetic sequence
CARMDESAPGGLQNWFDPW

SEQ ID NO: 1573 - protein, 21 aa, Artificial sequence
  synthetic sequence
CAREGYCSAGSCTDVNWFDPW

SEQ ID NO: 1574 - protein, 19 aa, Artificial sequence
  synthetic sequence
CARDRPSAGTNSYFYIDVW

SEQ ID NO: 1575 - protein, 16 aa, Artificial sequence
  synthetic sequence
CVTPRSVVTGSPIDYW

SEQ ID NO: 1576 - protein, 15 aa, Artificial sequence
  synthetic sequence
CARVTSNGVNWFDPW

SEQ ID NO: 1577 - protein, 27 aa, Artificial sequence
  synthetic sequence
CAKAGRAPPGTSTRDQKNIYYHYMDVW

SEQ ID NO: 1578 - protein, 18 aa, Artificial sequence
  synthetic sequence
CARGDRFNWNLSYYFNYW

SEQ ID NO: 1579 - protein, 23 aa, Artificial sequence
  synthetic sequence
CAKGSPHEGLLSVGELLYDFDYW

SEQ ID NO: 1580 - protein, 17 aa, Artificial sequence
  synthetic sequence
CARDRKLELLSYYMDVW

SEQ ID NO: 1581 - protein, 18 aa, Artificial sequence
  synthetic sequence
CAKDSGHIYYYFYYMDVW

SEQ ID NO: 1582 - protein, 24 aa, Artificial sequence
  synthetic sequence
CARRSLEGFCTNGVCSEDYCLDVW

SEQ ID NO: 1583 - protein, 21 aa, Artificial sequence
  synthetic sequence
CAKERLRFLEWYPGRHAFDIW

SEQ ID NO: 1584 - protein, 17 aa, Artificial sequence
  synthetic sequence
CARDPGFSEFLSMADHW

SEQ ID NO: 1585 - protein, 24 aa, Artificial sequence
  synthetic sequence
CAKDGGIRFLEWSTSRPFHYMDVW

SEQ ID NO: 1586 - protein, 18 aa, Artificial sequence
  synthetic sequence
CARASLTTMHYHYYLDVW

SEQ ID NO: 1587 - protein, 27 aa, Artificial sequence
  synthetic sequence
CARQISILDGSETSYVHPYYYYYMDVW

SEQ ID NO: 1588 - protein, 21 aa, Artificial sequence
  synthetic sequence
CAREKVALAASTTVPDAFHIW

SEQ ID NO: 1589 - protein, 21 aa, Artificial sequence
  synthetic sequence
CAKTRVDYDILTGYYRYFDHW

SEQ ID NO: 1590 - protein, 17 aa, Artificial sequence
  synthetic sequence
CARVLSSAWPLSSPDYW

SEQ ID NO: 1591 - protein, 13 aa, Artificial sequence
  synthetic sequence
CARAGGVNWFDPW

SEQ ID NO: 1592 - protein, 16 aa, Artificial sequence
  synthetic sequence
CAREVGVTGTTPLDYW

SEQ ID NO: 1593 - protein, 12 aa, Artificial sequence
  synthetic sequence
CARGPGGDFDYW

SEQ ID NO: 1594 - protein, 23 aa, Artificial sequence
  synthetic sequence
CARLRDYYDSRNYYYPKTAFDYW

SEQ ID NO: 1595 - protein, 19 aa, Artificial sequence
  synthetic sequence
CARVQYNSRSYFRDYYDFW

SEQ ID NO: 1596 - protein, 14 aa, Artificial sequence
  synthetic sequence
CARGFNYDDYQSKW

SEQ ID NO: 1597 - protein, 17 aa, Artificial sequence
  synthetic sequence
CVRCHGVMATICYFDRW

SEQ ID NO: 1598 - protein, 22 aa, Artificial sequence
  synthetic sequence
CARLITILRGVPGGGRSSIDVW

SEQ ID NO: 1599 - protein, 14 aa, Artificial sequence
  synthetic sequence
CARERDSSSSFDYW

SEQ ID NO: 1600 - protein, 18 aa, Artificial sequence
  synthetic sequence
CARIAPGTNCYTDYFDYW

SEQ ID NO: 1601 - protein, 12 aa, Artificial sequence
  synthetic sequence
CARGSYSWYYYW

SEQ ID NO: 1602 - protein, 20 aa, Artificial sequence
  synthetic sequence
CARVGARVVLTTTRGGFDIW

SEQ ID NO: 1603 - protein, 15 aa, Artificial sequence
  synthetic sequence
CARDLGSGFDPFKYW

SEQ ID NO: 1604 - protein, 24 aa, Artificial sequence
  synthetic sequence
CAREERGVTIFGVIITRLYYMDVW

SEQ ID NO: 1605 - protein, 19 aa, Artificial sequence
  synthetic sequence
CARHIRFADTSSWNYFDYC

SEQ ID NO: 1606 - protein, 13 aa, Artificial sequence
  synthetic sequence
CARAKNRWELLRW

SEQ ID NO: 1607 - protein, 21 aa, Artificial sequence
  synthetic sequence
CAKDRFLWGGNDITSWPIDYW

SEQ ID NO: 1608 - protein, 20 aa, Artificial sequence
  synthetic sequence
CARYAPYDHAWETYEAFDIW

SEQ ID NO: 1609 - protein, 20 aa, Artificial sequence
  synthetic sequence
CVREVGARNWYFSPRKIDPW

SEQ ID NO: 1610 - protein, 20 aa, Artificial sequence
  synthetic sequence
CARFNGLDTPIIGYWYFDLW

SEQ ID NO: 1611 - protein, 22 aa, Artificial sequence
  synthetic sequence
CARVSWRPRKFPGIAVAGFDYW

SEQ ID NO: 1612 - protein, 25 aa, Artificial sequence
  synthetic sequence
CARAHRNFYYESRGSAYYFYYMDVW

SEQ ID NO: 1613 - protein, 24 aa, Artificial sequence
  synthetic sequence
CARGTLAYCGGDCYSLRPWYFDLW

SEQ ID NO: 1614 - protein, 16 aa, Artificial sequence
  synthetic sequence
CARHPYDGSGFYVDQW

SEQ ID NO: 1615 - protein, 17 aa, Artificial sequence
  synthetic sequence
CARLPGWGGWSPRADFW

SEQ ID NO: 1616 - protein, 21 aa, Artificial sequence
  synthetic sequence
CARLRRGYSRPKYYYYGMDVW

SEQ ID NO: 1617 - protein, 20 aa, Artificial sequence
  synthetic sequence
CARMVRGVAARPRTYYFDYW

SEQ ID NO: 1618 - protein, 24 aa, Artificial sequence
  synthetic sequence
CARRASFRTGFYENYSFYYYLDVW

SEQ ID NO: 1619 - protein, 20 aa, Artificial sequence
  synthetic sequence
CARDLFQGYFGATYQEIDYW

SEQ ID NO: 1620 - protein, 12 aa, Artificial sequence
  synthetic sequence
CARTVVRLPDYW

SEQ ID NO: 1621 - protein, 14 aa, Artificial sequence
  synthetic sequence
CARGTSGEQFGDYW

SEQ ID NO: 1622 - protein, 23 aa, Artificial sequence
  synthetic sequence
CARDPLFWSDDYSLGYYYYMDVW

SEQ ID NO: 1623 - protein, 15 aa, Artificial sequence
  synthetic sequence
CARAHRRTAQIFDSW

SEQ ID NO: 1624 - protein, 17 aa, Artificial sequence
  synthetic sequence
CARTDCSRTSCSSLDPW

SEQ ID NO: 1625 - protein, 14 aa, Artificial sequence
  synthetic sequence
CARVLINYYYMDVW

SEQ ID NO: 1626 - protein, 24 aa, Artificial sequence
  synthetic sequence
CARDRGGISSTWYRNYYYYGLDVW

SEQ ID NO: 1627 - protein, 16 aa, Artificial sequence
  synthetic sequence
CARDKEHTYGRTFDYW

SEQ ID NO: 1628 - protein, 20 aa, Artificial sequence
  synthetic sequence
CARGTIFGVVIRGSGWFDPW

SEQ ID NO: 1629 - protein, 24 aa, Artificial sequence
  synthetic sequence
CARDVGVKGHDFWSGQDHWFFDLW

SEQ ID NO: 1630 - protein, 14 aa, Artificial sequence
  synthetic sequence
CVRDREALDWFDFW

SEQ ID NO: 1631 - protein, 20 aa, Artificial sequence
  synthetic sequence
CGRVSSDRESQRFGGLFDYW

SEQ ID NO: 1632 - protein, 18 aa, Artificial sequence
  synthetic sequence
CARSKGTSSGYDFIFDIW

SEQ ID NO: 1633 - protein, 24 aa, Artificial sequence
  synthetic sequence
CARLGVATILDPWALWGHWYFDLW

SEQ ID NO: 1634 - protein, 19 aa, Artificial sequence
  synthetic sequence
CTKGGPSTVMFASWHSDLW

SEQ ID NO: 1635 - protein, 14 aa, Artificial sequence [sequence omitted]

SEQ ID NO: 1636 - protein, 15 aa, Artificial sequence
  synthetic sequence
CAKSLPTSRYYFDYW

SEQ ID NO: 1637 - protein, 15 aa, Artificial sequence
  synthetic sequence
CAKSYSTVVTPNDYW

SEQ ID NO: 1638 - protein, 25 aa, Artificial sequence
  synthetic sequence
CAKIRQEIISPGLPQPPGLRAFDVW

SEQ ID NO: 1639 - protein, 21 aa, Artificial sequence
  synthetic sequence
CARLRRGYSRTKYYYYGMDVW

SEQ ID NO: 1640 - protein, 14 aa, Artificial sequence
  synthetic sequence
CARTWLWKDYFDYW

SEQ ID NO: 1641 - protein, 17 aa, Artificial sequence
  synthetic sequence
CARRGGWGRGSYYFDYW

SEQ ID NO: 1642 - protein, 13 aa, Artificial sequence
  synthetic sequence
CARGDGWMQLADW

SEQ ID NO: 1643 - protein, 17 aa, Artificial sequence
  synthetic sequence
CTRHVEMATIYSGNDYW

SEQ ID NO: 1644 - protein, 22 aa, Artificial sequence
  synthetic sequence
CARGQDSDYPYTVFYSNDPEFW

SEQ ID NO: 1645 - protein, 22 aa, Artificial sequence
  synthetic sequence
CARAGETDYEFWSGYRYGFDVW

SEQ ID NO: 1646 - protein, 14 aa, Artificial sequence
  synthetic sequence
CARTWVWKDYFDYW

SEQ ID NO: 1647 - protein, 20 aa, Artificial sequence
  synthetic sequence
CVRDRGYDSSGLWNKMFDYW

SEQ ID NO: 1648 - protein, 22 aa, Artificial sequence
  synthetic sequence
CARDRRSFGGADVLPRDAFDVW

SEQ ID NO: 1649 - protein, 17 aa, Artificial sequence
  synthetic sequence
CARDTGGWKERDSFDIW

SEQ ID NO: 1650 - protein, 17 aa, Artificial sequence
  synthetic sequence
CAKTNFGDYYHYGMDVW

SEQ ID NO: 1651 - protein, 24 aa, Artificial sequence
  synthetic sequence
CARRPSPSYHYVSGGYSGDVFDIW

SEQ ID NO: 1652 - protein, 13 aa, Artificial sequence
  synthetic sequence
CAKDQWLGRFDLW

SEQ ID NO: 1653 - protein, 16 aa, Artificial sequence
  synthetic sequence
CARDVLGILTGQFDPW

SEQ ID NO: 1654 - protein, 16 aa, Artificial sequence
  synthetic sequence
CARTQWVGSSLLFDYW

SEQ ID NO: 1655 - protein, 13 aa, Artificial sequence
  synthetic sequence
CARVRGGRYFDYW

SEQ ID NO: 1656 - protein, 14 aa, Artificial sequence
  synthetic sequence
CARTGYSSNSLDYW

SEQ ID NO: 1657 - protein, 21 aa, Artificial sequence
  synthetic sequence
CARGSSSAYLRHGRLGPMDVW

SEQ ID NO: 1658 - protein, 20 aa, Artificial sequence
  synthetic sequence
CARLRIASLPGVAYYGMDVW

SEQ ID NO: 1659 - protein, 16 aa, Artificial sequence
  synthetic sequence
CARTEASYGWGSFDSW

SEQ ID NO: 1660 - protein, 17 aa, Artificial sequence
  synthetic sequence
CASVWELLSVTGTPDYW

SEQ ID NO: 1661 - protein, 14 aa, Artificial sequence
  synthetic sequence
CATSMTSFYGFDVW

SEQ ID NO: 1662 - protein, 22 aa, Artificial sequence
  synthetic sequence
CARVGETDYEFWSGYRYGFDVW

SEQ ID NO: 1663 - protein, 19 aa, Artificial sequence
  synthetic sequence
CAKQGGNSLIQGGYYFDSW

SEQ ID NO: 1664 - protein, 13 aa, Artificial sequence
  synthetic sequence
CARYDPPYSFDDW

SEQ ID NO: 1665 - protein, 17 aa, Artificial sequence
  synthetic sequence
CATTDDFWSGYFEGLHW

SEQ ID NO: 1666 - protein, 13 aa, Artificial sequence
  synthetic sequence
CAHSGGYGSGLTW

SEQ ID NO: 1667 - protein, 24 aa, Artificial sequence
  synthetic sequence
CARSRNHHSYDGINDYYYYGMDVW

SEQ ID NO: 1668 - protein, 19 aa, Artificial sequence
  synthetic sequence
CVGAPAKPNVDWLSPFDYW

SEQ ID NO: 1669 - protein, 21 aa, Artificial sequence
  synthetic sequence
CARDSVPYVGVVTRGVYFDIW

SEQ ID NO: 1670 - protein, 13 aa, Artificial sequence
  synthetic sequence
CARIRDIGGIDYW

SEQ ID NO: 1671 - protein, 21 aa, Artificial sequence
  synthetic sequence
CARDSVPYVGIVTRGIYLDSW

SEQ ID NO: 1672 - protein, 22 aa, Artificial sequence
  synthetic sequence
CVRGRLGYCSGASCEKNWFDPW

SEQ ID NO: 1673 - protein, 13 aa, Artificial sequence
  synthetic sequence
CARGRTAFYMDVW

SEQ ID NO: 1674 - protein, 20 aa, Artificial sequence
  synthetic sequence
CAKGWATFRVDITNDAFDVW

SEQ ID NO: 1675 - protein, 22 aa, Artificial sequence
  synthetic sequence
CVRRRLGYCSGASCEKNWFDPW

SEQ ID NO: 1676 - protein, 17 aa, Artificial sequence
  synthetic sequence
CARALSPSGSGWNLAHW

SEQ ID NO: 1677 - protein, 21 aa, Artificial sequence
  synthetic sequence
CARASSTGGDHIAAVRLGDYW

SEQ ID NO: 1678 - protein, 19 aa, Artificial sequence
  synthetic sequence
CAKDHLPHYYISSGYFDHW

SEQ ID NO: 1679 - protein, 14 aa, Artificial sequence
  synthetic sequence
CARVRGWYDYFDCW

SEQ ID NO: 1680 - protein, 11 aa, Artificial sequence
  synthetic sequence
CARGGDWFDLW

SEQ ID NO: 1681 - protein, 18 aa, Artificial sequence
  synthetic sequence
CARGGPHYGDYGALWDYW

SEQ ID NO: 1682 - protein, 27 aa, Artificial sequence
  synthetic sequence
CARAPLRSRSNWELLLKRVDFLYLDVW

SEQ ID NO: 1683 - protein, 16 aa, Artificial sequence
  synthetic sequence
CARGLAAMAPYGLDVW

SEQ ID NO: 1684 - protein, 21 aa, Artificial sequence
  synthetic sequence
CARDLAPAAISGYYHYGMDVW

SEQ ID NO: 1685 - protein, 15 aa, Artificial sequence
  synthetic sequence
CASYCTGLSCYIDSW

SEQ ID NO: 1686 - protein, 18 aa, Artificial sequence
  synthetic sequence
CARATTRNGSSFPHFDYW

SEQ ID NO: 1687 - protein, 14 aa, Artificial sequence
  synthetic sequence
CARAPISARYFDLW

SEQ ID NO: 1688 - protein, 16 aa, Artificial sequence
  synthetic sequence
CARARDYYHSSGYDYW

SEQ ID NO: 1689 - protein, 20 aa, Artificial sequence
  synthetic sequence
CAKDLYGYDSSGVYISIDLW

SEQ ID NO: 1690 - protein, 15 aa, Artificial sequence
  synthetic sequence
CAKRRVGTYPAHDYW

SEQ ID NO: 1691 - protein, 16 aa, Artificial sequence
  synthetic sequence
CARGWFQLPRDWFDPW

SEQ ID NO: 1692 - protein, 17 aa, Artificial sequence
  synthetic sequence
CARGLNWNFFSWYFDLW

SEQ ID NO: 1693 - protein, 24 aa, Artificial sequence
  synthetic sequence
CARRPSPSYHYGSGGYSGDVFDIW

SEQ ID NO: 1694 - protein, 15 aa, Artificial sequence
  synthetic sequence
CARRGQGVLSSSDIW

SEQ ID NO: 1695 - protein, 22 aa, Artificial sequence
  synthetic sequence
CARLTVVVTAMSHYYINGMDVW

SEQ ID NO: 1696 - protein, 7 aa, Artificial sequence
  synthetic sequence
CARGYLW

SEQ ID NO: 1697 - protein, 14 aa, Artificial sequence
  synthetic sequence
CARDNDYGDLLDYW

SEQ ID NO: 1698 - protein, 15 aa, Artificial sequence
  synthetic sequence
CARRGQDLLSSSDIW

SEQ ID NO: 1699 - protein, 14 aa, Artificial sequence
  synthetic sequence
CARLYGLGSSDDLW

SEQ ID NO: 1700 - protein, 16 aa, Artificial sequence
  synthetic sequence
CARGSTDTNTGFFDYW

SEQ ID NO: 1701 - protein, 15 aa, Artificial sequence
  synthetic sequence
CVRDLHTIFESEDQW

SEQ ID NO: 1702 - protein, 13 aa, Artificial sequence
  synthetic sequence
CAKRYGDGAFDIW

SEQ ID NO: 1703 - protein, 16 aa, Artificial sequence
  synthetic sequence
CTTDQGIADRPSIGYW

SEQ ID NO: 1704 - protein, 15 aa, Artificial sequence
  synthetic sequence
CAHRMRSGIRFFDYW

SEQ ID NO: 1705 - protein, 17 aa, Artificial sequence
  synthetic sequence
CARRRLSGYSLDAFSLW

SEQ ID NO: 1706 - protein, 23 aa, Artificial sequence
  synthetic sequence
CAKRYYYESSGYYYEPGDAFDIW

SEQ ID NO: 1707 - protein, 19 aa, Artificial sequence
  synthetic sequence
CARGRGLLEWLFHYYFDYW

SEQ ID NO: 1708 - protein, 22 aa, Artificial sequence
  synthetic sequence
CARDALTTIFGVTANTYAMDVW

SEQ ID NO: 1709 - protein, 17 aa, Artificial sequence
  synthetic sequence
CAREMSATGGYWFFDIW

SEQ ID NO: 1710 - protein, 17 aa, Artificial sequence
  synthetic sequence
CARAGFKGEYPEFIQLW

SEQ ID NO: 1711 - protein, 15 aa, Artificial sequence
  synthetic sequence
CARVLPSGSLAADYW

SEQ ID NO: 1712 - protein, 20 aa, Artificial sequence
  synthetic sequence
CARQAQETSGWTRDWYFDLW

SEQ ID NO: 1713 - protein, 14 aa, Artificial sequence
  synthetic sequence
CAAEEYQRAHAGYW

SEQ ID NO: 1714 - protein, 14 aa, Artificial sequence
  synthetic sequence
CARGRGEYEGFDVW

SEQ ID NO: 1715 - protein, 16 aa, Artificial sequence
  synthetic sequence
CAAEYLAPRTGTFDYW

SEQ ID NO: 1716 - protein, 19 aa, Artificial sequence
  synthetic sequence
CARHRGNGPAGITTGMDVW

SEQ ID NO: 1717 - protein, 20 aa, Artificial sequence
  synthetic sequence
CARDSAFSSGSLFNGVFDIW

SEQ ID NO: 1718 - protein, 21 aa, Artificial sequence
  synthetic sequence
CAREKATRRGNYVYYYGMDVW

SEQ ID NO: 1719 - protein, 16 aa, Artificial sequence
  synthetic sequence
CARGEVVVTAALFEHW

SEQ ID NO: 1720 - protein, 23 aa, Artificial sequence
  synthetic sequence
CARRPSPSYHYVSGGYSGDVFYL

SEQ ID NO: 1721 - protein, 24 aa, Artificial sequence
  synthetic sequence
CARMHEYCSTTTCYTDFYYGMDVW

SEQ ID NO: 1722 - protein, 21 aa, Artificial sequence
  synthetic sequence
CARDSVPYVGVVTRGVYIDYW

SEQ ID NO: 1723 - protein, 18 aa, Artificial sequence
  synthetic sequence
CAKDYDFWGGPGETTDPW

SEQ ID NO: 1724 - protein, 21 aa, Artificial sequence
  synthetic sequence
CARGPPTYYHDNSGYYFFDYW

SEQ ID NO: 1725 - protein, 22 aa, Artificial sequence
  synthetic sequence
CARDRRSFRGADVLPRDAFDVW

SEQ ID NO: 1726 - protein, 17 aa, Artificial sequence
  synthetic sequence
CARGRNLNFFSWYFDLW

SEQ ID NO: 1727 - protein, 16 aa, Artificial sequence
  synthetic sequence
CARARGYSWDDAFDIW

SEQ ID NO: 1728 - protein, 20 aa, Artificial sequence
  synthetic sequence
CAVDQALRGMPSIEGWFDPW

SEQ ID NO: 1729 - protein, 22 aa, Artificial sequence
  synthetic sequence
CARGSGQYCTNGVCYPEVFDFW

SEQ ID NO: 1730 - protein, 19 aa, Artificial sequence
  synthetic sequence
CAKVVKDDHGWYANPFDIW

SEQ ID NO: 1731 - protein, 15 aa, Artificial sequence
  synthetic sequence
CTRQRLAAVGYFDNW

SEQ ID NO: 1732 - protein, 20 aa, Artificial sequence
  synthetic sequence
CAGHTPLYYFDASTYQEDYW

SEQ ID NO: 1733 - protein, 18 aa, Artificial sequence
  synthetic sequence
CARAPIYFYDTPGPFDYW

SEQ ID NO: 1734 - protein, 18 aa, Artificial sequence
  synthetic sequence
CARQAYCSSTACYKFDFW

SEQ ID NO: 1735 - protein, 14 aa, Artificial sequence
  synthetic sequence
CANSGRITVTSVNW

SEQ ID NO: 1736 - protein, 14 aa, Artificial sequence
  synthetic sequence
CARGYGDRPWFDTW

SEQ ID NO: 1737 - protein, 15 aa, Artificial sequence
  synthetic sequence
CARKGGDTTGLLDHW

SEQ ID NO: 1738 - protein, 22 aa, Artificial sequence
  synthetic sequence
CAKDRGRDYYDFWSGTYYFDYW

SEQ ID NO: 1739 - protein, 19 aa, Artificial sequence
  synthetic sequence
CAKYDFIDRYNPLGWFDPW

SEQ ID NO: 1740 - protein, 16 aa, Artificial sequence
  synthetic sequence
CARGDTYYASGAFDYW

SEQ ID NO: 1741 - protein, 23 aa, Artificial sequence
  synthetic sequence
CARCLMHYYDSSGYYYHDAFDIW

SEQ ID NO: 1742 - protein, 13 aa, Artificial sequence
  synthetic sequence
CARVAAVAGIDFW

SEQ ID NO: 1743 - protein, 21 aa, Artificial sequence
  synthetic sequence
CARVVRGSGSFFYYYYGMDVW

SEQ ID NO: 1744 - protein, 17 aa, Artificial sequence
  synthetic sequence
CARDRYDSRGFYGVDSW

SEQ ID NO: 1745 - protein, 18 aa, Artificial sequence
  synthetic sequence
CARRLSTPYYYNFVMDVW

SEQ ID NO: 1746 - protein, 15 aa, Artificial sequence
  synthetic sequence
CARESDPYGSGSFTW

SEQ ID NO: 1747 - protein, 13 aa, Artificial sequence
  synthetic sequence
CARGGKGGAFDIW

SEQ ID NO: 1748 - protein, 16 aa, Artificial sequence
  synthetic sequence
CVRESLQGPAFEFDYW

SEQ ID NO: 1749 - protein, 15 aa, Artificial sequence
  synthetic sequence
CARTPMVRGVVFDYW

SEQ ID NO: 1750 - protein, 16 aa, Artificial sequence
  synthetic sequence
CARPGGGYGYWYFDLW

SEQ ID NO: 1751 - protein, 21 aa, Artificial sequence
  synthetic sequence
CARGFQKRYSSSWYYVWFDPW

SEQ ID NO: 1752 - protein, 16 aa, Artificial sequence
  synthetic sequence
CASGDYYDSSGYPEYW

SEQ ID NO: 1753 - protein, 27 aa, Artificial sequence
  synthetic sequence
CARAPLRSRSNWELLLKRVDFLYLDLW

SEQ ID NO: 1754 - protein, 17 aa, Artificial sequence
  synthetic sequence
CAKGWPGDSGADAFDVW

SEQ ID NO: 1755 - protein, 11 aa, Artificial sequence
  synthetic sequence
CARHTGRNDYW

SEQ ID NO: 1756 - protein, 16 aa, Artificial sequence
  synthetic sequence
CCGQNYDNYYYAMDVW

SEQ ID NO: 1757 - protein, 14 aa, Artificial sequence
  synthetic sequence
CARDKAYGDSHEYW

SEQ ID NO: 1758 - protein, 19 aa, Artificial sequence
  synthetic sequence
CARHPYCTNGVCYPSRLYW

SEQ ID NO: 1759 - protein, 33 aa, Artificial sequence
  synthetic sequence
CARARTRQVVIPGSSSGFHPPPYSFYYFGMDVW

SEQ ID NO: 1760 - protein, 14 aa, Artificial sequence
  synthetic sequence
CVRFCSGDSCYPRW

SEQ ID NO: 1761 - protein, 19 aa, Artificial sequence
  synthetic sequence
CARWKDAVMGTQSNWFDPW

SEQ ID NO: 1762 - protein, 17 aa, Artificial sequence
  synthetic sequence
CARGWVRIVGATHFDYW

SEQ ID NO: 1763 - protein, 26 aa, Artificial sequence
  synthetic sequence
CAKERGDIVVEQVANGISISITVWTS

SEQ ID NO: 1764 - protein, 12 aa, Artificial sequence
  synthetic sequence
CARGAEGAFDIW

SEQ ID NO: 1765 - protein, 21 aa, Artificial sequence
  synthetic sequence
CARDLPDYIWGTYRPIHFDYW

SEQ ID NO: 1766 - protein, 16 aa, Artificial sequence
  synthetic sequence
CARHGIHMLRGWFDLW

SEQ ID NO: 1767 - protein, 21 aa, Artificial sequence
  synthetic sequence
CARAKSAPGHPFYYYYAMDVW

SEQ ID NO: 1768 - protein, 14 aa, Artificial sequence
  synthetic sequence
YSTRRYWDLPGLSP

SEQ ID NO: 1769 - protein, 21 aa, Artificial sequence
  synthetic sequence
CARAKSAPGHPFYNYYAMDVW

SEQ ID NO: 1770 - protein, 15 aa, Artificial sequence
  synthetic sequence
CAKDPYSNYGSIDYW

SEQ ID NO: 1771 - protein, 15 aa, Artificial sequence
  synthetic sequence
CAKDRGYHYGGCDYW

SEQ ID NO: 1772 - protein, 18 aa, Artificial sequence
  synthetic sequence
CARVGYSYGLGGDAFDIW

SEQ ID NO: 1773 - protein, 19 aa, Artificial sequence
  synthetic sequence
CARNDFWSGYYPRGWFDPW

SEQ ID NO: 1774 - protein, 18 aa, Artificial sequence
  synthetic sequence
CARGMHTAIITWDAFDFW

SEQ ID NO: 1775 - protein, 18 aa, Artificial sequence
  synthetic sequence
CARVHGGDWGVYWYFDLW

SEQ ID NO: 1776 - protein, 18 aa, Artificial sequence
  synthetic sequence
CAREMGDHWAGTHGLDVW

SEQ ID NO: 1777 - protein, 25 aa, Artificial sequence
  synthetic sequence
CARGVKSSSWYVSGGKYGIHGMDVW

SEQ ID NO: 1778 - protein, 18 aa, Artificial sequence
  synthetic sequence
CASAGGSSGWPQHYFDYW

SEQ ID NO: 1779 - protein, 21 aa, Artificial sequence
  synthetic sequence
CVKDRIVRITTGYYNYGMDVW

SEQ ID NO: 1780 - protein, 21 aa, Artificial sequence
  synthetic sequence
CAVGEYYYDSSGYYECYFDYW

SEQ ID NO: 1781 - protein, 15 aa, Artificial sequence
  synthetic sequence
CARGTYVSAASMDVW

SEQ ID NO: 1782 - protein, 15 aa, Artificial sequence
  synthetic sequence
CARDRAGYDFDFDSW

SEQ ID NO: 1783 - protein, 17 aa, Artificial sequence
  synthetic sequence
CAILERLLESLLLLPTL

SEQ ID NO: 1784 - protein, 14 aa, Artificial sequence
  synthetic sequence
CATGTYSTDAFEIW

SEQ ID NO: 1785 - protein, 26 aa, Artificial sequence
  synthetic sequence
CARDVAARWSGGFKRKPQYYYAMDVW

SEQ ID NO: 1786 - protein, 18 aa, Artificial sequence
  synthetic sequence
CVRDRMGTNSGSYFFGYW

SEQ ID NO: 1787 - protein, 14 aa, Artificial sequence
  synthetic sequence
CVRGVGPTPRFDFW

SEQ ID NO: 1788 - protein, 22 aa, Artificial sequence
  synthetic sequence
CARDIFQMSKTVTPNYYGMDVW

SEQ ID NO: 1789 - protein, 16 aa, Artificial sequence
  synthetic sequence
CAKGKSGSFIYGMDVW

SEQ ID NO: 1790 - protein, 18 aa, Artificial sequence
  synthetic sequence
CARDAPIRDSNGYSTDYW

SEQ ID NO: 1791 - protein, 16 aa, Artificial sequence
  synthetic sequence
CARGISAWHTAAFDVW

SEQ ID NO: 1792 - protein, 27 aa, Artificial sequence
  synthetic sequence
CAREGRIGHYNDRRRGVYHSYYGMDVW

SEQ ID NO: 1793 - protein, 16 aa, Artificial sequence
  synthetic sequence
CAKVHDGGNHVPFDYW

SEQ ID NO: 1794 - protein, 21 aa, Artificial sequence
  synthetic sequence
CARAKSAPGHPFYYYYTMDVW

SEQ ID NO: 1795 - protein, 15 aa, Artificial sequence
  synthetic sequence
CARAVGVTSYGMDVW

SEQ ID NO: 1796 - protein, 15 aa, Artificial sequence
  synthetic sequence
CAVSFYDFWSGTDYW

SEQ ID NO: 1797 - protein, 16 aa, Artificial sequence
  synthetic sequence
CARERPGRADVAYEIW

SEQ ID NO: 1798 - protein, 21 aa, Artificial sequence
  synthetic sequence
CARAKSAPGHPFYFYYAMDVW

SEQ ID NO: 1799 - protein, 21 aa, Artificial sequence
  synthetic sequence
CAQTLEAAFLHSFYRGYFDNW

SEQ ID NO: 1800 - protein, 18 aa, Artificial sequence
  synthetic sequence
CAKDEDSSVVTRPEIDYW

SEQ ID NO: 1801 - protein, 20 aa, Artificial sequence
  synthetic sequence
CARVKYYQDSSGYSNWFDPW

SEQ ID NO: 1802 - protein, 16 aa, Artificial sequence
  synthetic sequence
CARDPLPGYGDYLDHW

SEQ ID NO: 1803 - protein, 24 aa, Artificial sequence
  synthetic sequence
CAKHWGASYYGSKNTYYYYGLDVW

SEQ ID NO: 1804 - protein, 22 aa, Artificial sequence
  synthetic sequence
CARDYDYVWGSYPTTEYYFDYW

SEQ ID NO: 1805 - protein, 20 aa, Artificial sequence
  synthetic sequence
CASSTQIKDTGYSTGWYGYW

SEQ ID NO: 1806 - protein, 20 aa, Artificial sequence
  synthetic sequence
CARRAVNRGHERPYDAFDIW

SEQ ID NO: 1807 - protein, 18 aa, Artificial sequence
  synthetic sequence
CARAGGRDGYKVYFFDYW

SEQ ID NO: 1808 - protein, 11 aa, Artificial sequence
  synthetic sequence
CARGYDVFDYW

SEQ ID NO: 1809 - protein, 17 aa, Artificial sequence
  synthetic sequence
CAKDKAAVVAGYGMDVW

SEQ ID NO: 1810 - protein, 20 aa, Artificial sequence
  synthetic sequence
CARDIVHYSMIDYYNYMDVW

SEQ ID NO: 1811 - protein, 17 aa, Artificial sequence
  synthetic sequence
CARDGSTDYGPDWFDPW

SEQ ID NO: 1812 - protein, 22 aa, Artificial sequence
  synthetic sequence
CAKSNAAGPYSGSGYAFYFDSW

SEQ ID NO: 1813 - protein, 20 aa, Artificial sequence
  synthetic sequence
CVSVASTIFGVVFPSIFESW

SEQ ID NO: 1814 - protein, 16 aa, Artificial sequence
  synthetic sequence
CARDAYSSSFWFFDLW

SEQ ID NO: 1815 - protein, 16 aa, Artificial sequence
  synthetic sequence
CAKASGDFVLGYFQHW

SEQ ID NO: 1816 - protein, 20 aa, Artificial sequence
  synthetic sequence
CVSVSSTIFGVVFPSIFESW

SEQ ID NO: 1817 - protein, 17 aa, Artificial sequence
  synthetic sequence
CAKVTFGDYFQYGLDVW

SEQ ID NO: 1818 - protein, 23 aa, Artificial sequence
  synthetic sequence
CAKVGLDIRVVRGELLTWAFEYW

SEQ ID NO: 1819 - protein, 24 aa, Artificial sequence
  synthetic sequence
CVKGLNYVWGSYRGEYYSYGMDVW

SEQ ID NO: 1820 - protein, 18 aa, Artificial sequence
  synthetic sequence
CARGTKYAWNVPPEDDYW

SEQ ID NO: 1821 - protein, 16 aa, Artificial sequence
  synthetic sequence
CARLIYGDFYYGMDVW

SEQ ID NO: 1822 - protein, 22 aa, Artificial sequence
  synthetic sequence
CAHERPYCTSMSCSDYYGMDVW

SEQ ID NO: 1823 - protein, 22 aa, Artificial sequence
  synthetic sequence
CAHERPYCTRMSCSDYYGMDVW

SEQ ID NO: 1824 - protein, 22 aa, Artificial sequence
  synthetic sequence
CAHERPYCTRMTCSDYYGMDVW

SEQ ID NO: 1825 - protein, 19 aa, Artificial sequence
  synthetic sequence
CARQADAYSWDNRALYDVW

SEQ ID NO: 1826 - protein, 20 aa, Artificial sequence
  synthetic sequence
CVSVSTTIFGVVFPSIFESW

SEQ ID NO: 1827 - protein, 27 aa, Artificial sequence
  synthetic sequence
CARGGSGGSGIYYNGPLWRYYYGMDVW

SEQ ID NO: 1828 - protein, 23 aa, Artificial sequence
  synthetic sequence
CARWDGGYRHGSDTYVYYGLDVW

SEQ ID NO: 1829 - protein, 20 aa, Artificial sequence
  synthetic sequence
CVSVSSAIFGVVFPSIFESW

SEQ ID NO: 1830 - protein, 24 aa, Artificial sequence
  synthetic sequence
CVKGLNYVWGSYRGEYYSYGMHVW

SEQ ID NO: 1831 - protein, 16 aa, Artificial sequence
  synthetic sequence
CASRDYYDYTWPVDFW

SEQ ID NO: 1832 - protein, 25 aa, Artificial sequence
  synthetic sequence
CATSITPSYYDTVWGTFVPTSMDVW

SEQ ID NO: 1833 - protein, 20 aa, Artificial sequence
  synthetic sequence
CARGRGDYRTRGVTSYFDRW

SEQ ID NO: 1834 - protein, 21 aa, Artificial sequence
  synthetic sequence
CARDPGESSSWYEGVWYFDLW

SEQ ID NO: 1835 - protein, 22 aa, Artificial sequence
  synthetic sequence
CAHERAYCTRMSCSDYYGMDVW

SEQ ID NO: 1836 - protein, 23 aa, Artificial sequence
  synthetic sequence
CARWDGGYRHGSDTYFYYGLDVW

SEQ ID NO: 1837 - protein, 23 aa, Artificial sequence
  synthetic sequence
CAKGDGYYCSGGSCYSFPDFDYW

SEQ ID NO: 1838 - protein, 14 aa, Artificial sequence
  synthetic sequence
CGGDSSGWHYFDSW

SEQ ID NO: 1839 - protein, 19 aa, Artificial sequence
  synthetic sequence
CAKDSGLYDYAPTMGFDSW

SEQ ID NO: 1840 - protein, 22 aa, Artificial sequence
  synthetic sequence
CAHERPFCTRMSCSDYYGMDVW

SEQ ID NO: 1841 - protein, 22 aa, Artificial sequence
  synthetic sequence
CARSQPDVLTGYYLNYWYFDLW

SEQ ID NO: 1842 - protein, 14 aa, Artificial sequence
  synthetic sequence
CARVNNYYFVFDIW

SEQ ID NO: 1843 - protein, 11 aa, Artificial sequence
  synthetic sequence
CARGYPGFDYW

SEQ ID NO: 1844 - protein, 23 aa, Artificial sequence
  synthetic sequence
CARMGPEPEYSDSSGTWDYFDLW

SEQ ID NO: 1845 - protein, 17 aa, Artificial sequence
  synthetic sequence
CARGLALDTAMSGVDYW

SEQ ID NO: 1846 - protein, 20 aa, Artificial sequence
  synthetic sequence
CVSVSTTILGVVFPSIFESW

SEQ ID NO: 1847 - protein, 16 aa, Artificial sequence
  synthetic sequence
CAKGRSVMTTEVPDSW

SEQ ID NO: 1848 - protein, 22 aa, Artificial sequence
  synthetic sequence
CARPLGTLTHLEDTSSHWFDPW

SEQ ID NO: 1849 - protein, 12 aa, Artificial sequence
  synthetic sequence
CARGPIDAFDIW

SEQ ID NO: 1850 - protein, 14 aa, Artificial sequence
  synthetic sequence
CARAWHPDSWFDPW

SEQ ID NO: 1851 - protein, 14 aa, Artificial sequence
  synthetic sequence
CARPDDGNSVFDYW

SEQ ID NO: 1852 - protein, 23 aa, Artificial sequence
  synthetic sequence
CARALYDDDIWSGPFYYYGMDVW

SEQ ID NO: 1853 - protein, 16 aa, Artificial sequence
  synthetic sequence
CARGSGYSAVAEFDPW

SEQ ID NO: 1854 - protein, 12 aa, Artificial sequence
  synthetic sequence
CASGPTDAFDIW

SEQ ID NO: 1855 - protein, 18 aa, Artificial sequence
  synthetic sequence
CARGARNYGPGYNWFDPW

SEQ ID NO: 1856 - protein, 21 aa, Artificial sequence
  synthetic sequence
CAHSPRRYDFRSGYYSLPDVW

SEQ ID NO: 1857 - protein, 23 aa, Artificial sequence
  synthetic sequence
CARDFHRPEHHCSIGSCYGFDVW

SEQ ID NO: 1858 - protein, 23 aa, Artificial sequence
  synthetic sequence
CARIRPDQWLVTTSRPSYYFDFW

SEQ ID NO: 1859 - protein, 18 aa, Artificial sequence
  synthetic sequence
CARGTKYGWNVPPEDDYW

SEQ ID NO: 1860 - protein, 20 aa, Artificial sequence
  synthetic sequence
CAAGPAPASSTWPSNWFDPW

SEQ ID NO: 1861 - protein, 30 aa, Artificial sequence
  synthetic sequence
CASSYIFIGPPARAMGDPQWRHRRGRFDFW

SEQ ID NO: 1862 - protein, 18 aa, Artificial sequence
  synthetic sequence
CVRVYYDFWSAPRGMDVW

SEQ ID NO: 1863 - protein, 15 aa, Artificial sequence
  synthetic sequence
CARGTLTAEYYFDYW

SEQ ID NO: 1864 - protein, 18 aa, Artificial sequence
  synthetic sequence
CARGGGYSGYGGDYFDYW

SEQ ID NO: 1865 - protein, 31 aa, Artificial sequence
  synthetic sequence
CARDPIRPSSDDFWSGREDRYYYFYYGMDVW

SEQ ID NO: 1866 - protein, 14 aa, Artificial sequence
  synthetic sequence
CARDAKEARVFDFW

SEQ ID NO: 1867 - protein, 16 aa, Artificial sequence
  synthetic sequence
CARLIHGDLYYGMDVW

SEQ ID NO: 1868 - protein, 21 aa, Artificial sequence
  synthetic sequence
CARRRYDILTGYLHFYAMDVW

SEQ ID NO: 1869 - protein, 15 aa, Artificial sequence
  synthetic sequence
CARHRDYYYYGMDVW

SEQ ID NO: 1870 - protein, 18 aa, Artificial sequence
  synthetic sequence
CARRMAAPGQGRVYFDYW

SEQ ID NO: 1871 - protein, 21 aa, Artificial sequence
  synthetic sequence
CAKDRRFDYYDSSGYYYHDYW

SEQ ID NO: 1872 - protein, 22 aa, Artificial sequence
  synthetic sequence
CATPATPRPLVYTSGWYYLDYW

SEQ ID NO: 1873 - protein, 20 aa, Artificial sequence
  synthetic sequence
CVSVSTSIFGVVFPSIFESW

SEQ ID NO: 1874 - protein, 18 aa, Artificial sequence
  synthetic sequence
CAKSSRWYDSYYYGMDVW

SEQ ID NO: 1875 - protein, 18 aa, Artificial sequence
  synthetic sequence
CARTYDFWSGYFTPPGYW

SEQ ID NO: 1876 - protein, 15 aa, Artificial sequence
  synthetic sequence
CAKRGPQSGSYFEYW

SEQ ID NO: 1877 - protein, 14 aa, Artificial sequence
  synthetic sequence
CVCQRFSTYYFDSW

SEQ ID NO: 1878 - protein, 17 aa, Artificial sequence
  synthetic sequence
CAKDSYCSSTTCYMDYW

SEQ ID NO: 1879 - protein, 18 aa, Artificial sequence
  synthetic sequence
CARSGFCSSTSCLNLDFW

SEQ ID NO: 1880 - protein, 12 aa, Artificial sequence
  synthetic sequence
CVRGGYWQFDFW

SEQ ID NO: 1881 - protein, 14 aa, Artificial sequence
  synthetic sequence
CARGATRAYYFDYW

SEQ ID NO: 1882 - protein, 22 aa, Artificial sequence
  synthetic sequence
CAHERPYCTRMRCSDYYGMDVW

SEQ ID NO: 1883 - protein, 18 aa, Artificial sequence
  synthetic sequence
CARSGFCFSTHCLNLDFW

SEQ ID NO: 1884 - protein, 18 aa, Artificial sequence
  synthetic sequence
CARLGLRGGFYPYYFDYW

SEQ ID NO: 1885 - protein, 22 aa, Artificial sequence
  synthetic sequence
CAKDLGAVAGGGVYFYYGMDVW

SEQ ID NO: 1886 - protein, 20 aa, Artificial sequence
  synthetic sequence
CARSGPFPGRVVRWGYFDYW

SEQ ID NO: 1887 - protein, 14 aa, Artificial sequence
  synthetic sequence
CARLETVTTNFDFW

SEQ ID NO: 1888 - protein, 14 aa, Artificial sequence
  synthetic sequence
CARPDDGNSVFDSW

SEQ ID NO: 1889 - protein, 12 aa, Artificial sequence
  synthetic sequence
CTTGGQLRRPYW

SEQ ID NO: 1890 - protein, 20 aa, Artificial sequence
  synthetic sequence
CVSVSTTIFGVIFPSIFESW

SEQ ID NO: 1891 - protein, 21 aa, Artificial sequence
  synthetic sequence
CAKGGTYHDYWSGYSDAFDMW

SEQ ID NO: 1892 - protein, 15 aa, Artificial sequence
  synthetic sequence
CARGIRGWNDGTDYW

SEQ ID NO: 1893 - protein, 22 aa, Artificial sequence
  synthetic sequence
CARANRRYSYGYNYHYYGMDVW

SEQ ID NO: 1894 - protein, 12 aa, Artificial sequence
  synthetic sequence
CVNFGAITSRPW

SEQ ID NO: 1895 - protein, 21 aa, Artificial sequence
  synthetic sequence
CVHTERNSYDSSGYRGRFDFW

SEQ ID NO: 1896 - protein, 13 aa, Artificial sequence
  synthetic sequence
CARMSIDENFDYW

SEQ ID NO: 1897 - protein, 23 aa, Artificial sequence
  synthetic sequence
CARDFHRPDHHCSIGSCYGFDVW

SEQ ID NO: 1898 - protein, 24 aa, Artificial sequence
  synthetic sequence
CAKDWGPDLWFGDGSRQFYGMDAW

SEQ ID NO: 1899 - protein, 14 aa, Artificial sequence
  synthetic sequence
CARDKIGSFCIDHW

SEQ ID NO: 1900 - protein, 24 aa, Artificial sequence
  synthetic sequence
CVKGLNYVWGIYRGEYYSYGMDVW

SEQ ID NO: 1901 - protein, 22 aa, Artificial sequence
  synthetic sequence
CAHERSYCTRMSCSDYYGMDVW

SEQ ID NO: 1902 - protein, 26 aa, Artificial sequence
  synthetic sequence
CARQKSYYDRGGYWLEGDRSLAFEYW

SEQ ID NO: 1903 - protein, 17 aa, Artificial sequence
  synthetic sequence
CASQQSYNWNDVALDCW

SEQ ID NO: 1904 - protein, 17 aa, Artificial sequence
  synthetic sequence
CVREGLDYSGSFQFDFW

SEQ ID NO: 1905 - protein, 19 aa, Artificial sequence
  synthetic sequence
CARDSRYCVGGTCKYLKRW

SEQ ID NO: 1906 - protein, 13 aa, Artificial sequence
  synthetic sequence
CARDRHDWYFDLW

SEQ ID NO: 1907 - protein, 14 aa, Artificial sequence
  synthetic sequence
CVVYYYGRGGQGFW

SEQ ID NO: 1908 - protein, 23 aa, Artificial sequence
  synthetic sequence
CARDSYYDYVWGSYRLLYGMDVW

SEQ ID NO: 1909 - protein, 18 aa, Artificial sequence
  synthetic sequence
CAKDLAHSDFWSGYLDTW

SEQ ID NO: 1910 - protein, 21 aa, Artificial sequence
  synthetic sequence
CAKLWGGYGDYIGRGEGFDFW

SEQ ID NO: 1911 - protein, 22 aa, Artificial sequence
  synthetic sequence
CAHERPFCTRMRCSDYYGMDVW

SEQ ID NO: 1912 - protein, 20 aa, Artificial sequence
  synthetic sequence
CARAHTHCTNGVCSDAFDIW

SEQ ID NO: 1913 - protein, 18 aa, Artificial sequence
  synthetic sequence
CARRLWITFGGVIANDYW

SEQ ID NO: 1914 - protein, 17 aa, Artificial sequence
  synthetic sequence
CARHLSSGWLKLGFDYW

SEQ ID NO: 1915 - protein, 21 aa, Artificial sequence
  synthetic sequence
CAREKAVAGKGGYYYYGMDVW

SEQ ID NO: 1916 - protein, 16 aa, Artificial sequence
  synthetic sequence
CARLIYGDLYYGMDVW

SEQ ID NO: 1917 - protein, 21 aa, Artificial sequence
  synthetic sequence
CAASPPRGDIVIVPVAAFDFW

SEQ ID NO: 1918 - protein, 24 aa, Artificial sequence
  synthetic sequence
CARVKEDIVVGPAGKDYYYYMDVW

SEQ ID NO: 1919 - protein, 27 aa, Artificial sequence
  synthetic sequence
CARPTPGLYDSWTGFPNGDTCCYMDVW

SEQ ID NO: 1920 - protein, 19 aa, Artificial sequence
  synthetic sequence
CARTSEYDFWSGYYGFGPW

SEQ ID NO: 1921 - protein, 16 aa, Artificial sequence
  synthetic sequence
CARRRQISSSIYFDYW

SEQ ID NO: 1922 - protein, 17 aa, Artificial sequence
  synthetic sequence
CTTQKTPYSNPVYFDYW

SEQ ID NO: 1923 - protein, 20 aa, Artificial sequence
  synthetic sequence
CARSGFCSGGSCYANWFDSW

SEQ ID NO: 1924 - protein, 25 aa, Artificial sequence
  synthetic sequence
CARVVGLDYGDYGDRRLGEYYFDYW

SEQ ID NO: 1925 - protein, 21 aa, Artificial sequence
  synthetic sequence
CARDGTMTIFGVVYLGWFDTW

SEQ ID NO: 1926 - protein, 24 aa, Artificial sequence
  synthetic sequence
CAKDATDFRSGPRPGFYYYYMDVW

SEQ ID NO: 1927 - protein, 15 aa, Artificial sequence
  synthetic sequence
CARHFDGGYYYMDFW

SEQ ID NO: 1928 - protein, 16 aa, Artificial sequence
  synthetic sequence
CARAQEWLELDGFDMW

SEQ ID NO: 1929 - protein, 29 aa, Artificial sequence
  synthetic sequence
CARVTSGYSTMWKWGMGEPATYYYYMDVW

SEQ ID NO: 1930 - protein, 20 aa, Artificial sequence
  synthetic sequence
AFVRYSRGHYPPHYYFMDVW

SEQ ID NO: 1931 - protein, 16 aa, Artificial sequence
  synthetic sequence
CARLKGNRGYYYMDVW

SEQ ID NO: 1932 - protein, 10 aa, Artificial sequence
  synthetic sequence
CAHRIAGAYY

SEQ ID NO: 1933 - protein, 20 aa, Artificial sequence
  synthetic sequence
CAREGYSHGYSYYYYYMDVW

SEQ ID NO: 1934 - protein, 11 aa, Artificial sequence
  synthetic sequence
CTRDPPYFDNW

SEQ ID NO: 1935 - protein, 15 aa, Artificial sequence
  synthetic sequence
CARREVGYRLLYGDW

SEQ ID NO: 1936 - protein, 18 aa, Artificial sequence
  synthetic sequence
CARHPGSGYYYGWNFDLW

SEQ ID NO: 1937 - protein, 17 aa, Artificial sequence
  synthetic sequence
CARGGGYYDSSILIDYW

SEQ ID NO: 1938 - protein, 14 aa, Artificial sequence
  synthetic sequence
CVRVSLHWARLDYW

SEQ ID NO: 1939 - protein, 12 aa, Artificial sequence
  synthetic sequence
CARESYISLDSW

SEQ ID NO: 1940 - protein, 23 aa, Artificial sequence
  synthetic sequence
CARGRKIVVTVDHWERPNGFDIW

SEQ ID NO: 1941 - protein, 15 aa, Artificial sequence
  synthetic sequence
CARQYLGSSSSGDYW

SEQ ID NO: 1942 - protein, 19 aa, Artificial sequence
  synthetic sequence
CARHEVADMVIVAAALDVW

SEQ ID NO: 1943 - protein, 17 aa, Artificial sequence
  synthetic sequence
CARDPYLELQWRAFDIW

SEQ ID NO: 1944 - protein, 24 aa, Artificial sequence
  synthetic sequence
CVRTTVPAAIEGAVRFYYYYLDVW

SEQ ID NO: 1945 - protein, 17 aa, Artificial sequence
  synthetic sequence
CARQHHGDHYYYYMDVW

SEQ ID NO: 1946 - protein, 17 aa, Artificial sequence
  synthetic sequence
CARANKYVGSWYFFDYW

SEQ ID NO: 1947 - protein, 18 aa, Artificial sequence
  synthetic sequence
CARDRIAVTATPGLLDYW

SEQ ID NO: 1948 - protein, 20 aa, Artificial sequence
  synthetic sequence
CARNNYYDNSGYSYWYFDLW

SEQ ID NO: 1949 - protein, 20 aa, Artificial sequence
  synthetic sequence
CARHKEVAIATDYYYYMDVW

SEQ ID NO: 1950 - protein, 20 aa, Artificial sequence
  synthetic sequence
CARDSGITFGGLPLNYFDHW

SEQ ID NO: 1951 - protein, 17 aa, Artificial sequence
  synthetic sequence
CAHTNSPINGYYFFDYW

SEQ ID NO: 1952 - protein, 20 aa, Artificial sequence
  synthetic sequence
CARGPPLTTPTSWSFFFDIW

SEQ ID NO: 1953 - protein, 16 aa, Artificial sequence
  synthetic sequence
CAREGSGGYYNWFDPW

SEQ ID NO: 1954 - protein, 22 aa, Artificial sequence
  synthetic sequence
CARPGNYLRRWNSGTYYHFDFW

SEQ ID NO: 1955 - protein, 25 aa, Artificial sequence
  synthetic sequence
CARGSRIGGVLAWGPTYNYCYMDVW

SEQ ID NO: 1956 - protein, 18 aa, Artificial sequence
  synthetic sequence
CARYYTRTIYDHDAFDIW

SEQ ID NO: 1957 - protein, 19 aa, Artificial sequence
  synthetic sequence
CARSPYDILTGYTDPSDIW

SEQ ID NO: 1958 - protein, 13 aa, Artificial sequence
  synthetic sequence
CAREPGHYYMDVW

SEQ ID NO: 1959 - protein, 14 aa, Artificial sequence
  synthetic sequence
CARMGLGWDYFDSW

SEQ ID NO: 1960 - protein, 13 aa, Artificial sequence
  synthetic sequence
CARRGGYYFIDYW

SEQ ID NO: 1961 - protein, 21 aa, Artificial sequence
  synthetic sequence
CARDQVRGDFWSGSGDAFDVW

SEQ ID NO: 1962 - protein, 14 aa, Artificial sequence
  synthetic sequence
CARRTMFNYYFDYW

SEQ ID NO: 1963 - protein, 18 aa, Artificial sequence
  synthetic sequence
CARDPGGHDYVWGSYYDW

SEQ ID NO: 1964 - protein, 17 aa, Artificial sequence
  synthetic sequence
CARDAGYCRGGSCYDYW

SEQ ID NO: 1965 - protein, 18 aa, Artificial sequence
  synthetic sequence
CAREHRDYYDSSGYYDRW

SEQ ID NO: 1966 - protein, 18 aa, Artificial sequence
  synthetic sequence
CARGGPTYYYGSGSQLYW

SEQ ID NO: 1967 - protein, 15 aa, Artificial sequence
  synthetic sequence
CAKAMRWELRSSDYW

SEQ ID NO: 1968 - protein, 22 aa, Artificial sequence
  synthetic sequence
CARDVFTGWNHHVGLYNWFDPW

SEQ ID NO: 1969 - protein, 17 aa, Artificial sequence
  synthetic sequence
CARDWYYDSRRDAFDIW

SEQ ID NO: 1970 - protein, 23 aa, Artificial sequence
  synthetic sequence
CAGGLVTVSGVVIHAGRDWFDPW

SEQ ID NO: 1971 - protein, 16 aa, Artificial sequence
  synthetic sequence
CARLRGNRGYYYMDVW

SEQ ID NO: 1972 - protein, 23 aa, Artificial sequence
  synthetic sequence
CARPGYCIGGNCYGRVRLYFQSW

SEQ ID NO: 1973 - protein, 19 aa, Artificial sequence
  synthetic sequence
CARGDNSDRFQISYYFDYW

SEQ ID NO: 1974 - protein, 21 aa, Artificial sequence
  synthetic sequence
CAKDWGLFRGGDGYSYYFDYW

SEQ ID NO: 1975 - protein, 16 aa, Artificial sequence
  synthetic sequence
CARVHDHGDYGWFDPW

SEQ ID NO: 1976 - protein, 13 aa, Artificial sequence
  synthetic sequence
CARNRGYQQFDYW

SEQ ID NO: 1977 - protein, 18 aa, Artificial sequence
  synthetic sequence
CARDEAGRTMSVPFFDYW

SEQ ID NO: 1978 - protein, 17 aa, Artificial sequence
  synthetic sequence
CARDYYFDSSGYRFDYW

SEQ ID NO: 1979 - protein, 20 aa, Artificial sequence
  synthetic sequence
CARGGGGFHDPSPNYSPDYW

SEQ ID NO: 1980 - protein, 19 aa, Artificial sequence
  synthetic sequence
CAKGRDPVENVVIFPFDCW

SEQ ID NO: 1981 - protein, 18 aa, Artificial sequence
  synthetic sequence
CARDGLTYCGGECFFAYW

SEQ ID NO: 1982 - protein, 24 aa, Artificial sequence
  synthetic sequence
CARDGWRYDGRGHYELNYYYMNVW

SEQ ID NO: 1983 - protein, 21 aa, Artificial sequence
  synthetic sequence
CVKNQGIYGSGSYPADTFHIW

SEQ ID NO: 1984 - protein, 14 aa, Artificial sequence [sequence omitted]

SEQ ID NO: 1985 - protein, 20 aa, Artificial sequence
  synthetic sequence
CAHRGFYQPQYFDTSAYYYW

SEQ ID NO: 1986 - protein, 18 aa, Artificial sequence
  synthetic sequence
CAHSHAIGDNYLSYFDFW

SEQ ID NO: 1987 - protein, 17 aa, Artificial sequence
  synthetic sequence
CAKGFGDYRYYYYMDVW

SEQ ID NO: 1988 - protein, 22 aa, Artificial sequence
  synthetic sequence
CAARPPFLGYRDSTICHVGSAP

SEQ ID NO: 1989 - protein, 19 aa, Artificial sequence
  synthetic sequence
CARDLTVFGVLDYYYMDVW

SEQ ID NO: 1990 - protein, 22 aa, Artificial sequence
  synthetic sequence
CAHNGGYDFRSGYYWAHWFDPW

SEQ ID NO: 1991 - protein, 17 aa, Artificial sequence
  synthetic sequence
CARGPPTGEWSYYFDNW

SEQ ID NO: 1992 - protein, 18 aa, Artificial sequence
  synthetic sequence
CARDRWSGSFGGAPLDSW

SEQ ID NO: 1993 - protein, 17 aa, Artificial sequence
  synthetic sequence
CARGVGLAGAGTSFDYW

SEQ ID NO: 1994 - protein, 15 aa, Artificial sequence
  synthetic sequence
CARRDDFWSGYYDYW

SEQ ID NO: 1995 - protein, 20 aa, Artificial sequence
  synthetic sequence
CARLGVGELSLLGFGAFDIW

SEQ ID NO: 1996 - protein, 15 aa, Artificial sequence
  synthetic sequence
CAREANFWSGYFDYW

SEQ ID NO: 1997 - protein, 21 aa, Artificial sequence
  synthetic sequence
CARAEDSEIFGVVANTWFDPW

SEQ ID NO: 1998 - protein, 21 aa, Artificial sequence
  synthetic sequence
CASRRITIFGVGELIDWVDPW

SEQ ID NO: 1999 - protein, 16 aa, Artificial sequence
  synthetic sequence
CARRRESGSSIYFDYW

SEQ ID NO: 2000 - protein, 20 aa, Artificial sequence
  synthetic sequence
CARLGVGELSLLGFGTFDIW

SEQ ID NO: 2001 - protein, 24 aa, Artificial sequence
  synthetic sequence
CTRPPWAFWSEYYQMGDYYYMDVW

SEQ ID NO: 2002 - protein, 16 aa, Artificial sequence
  synthetic sequence
CAREPYDSWLGYIDVW

SEQ ID NO: 2003 - protein, 21 aa, Artificial sequence
  synthetic sequence
CARAAYLHFWSDYPRGWFDPW

SEQ ID NO: 2004 - protein, 18 aa, Artificial sequence
  synthetic sequence
CARIRVGYNYGPDAFDIW

SEQ ID NO: 2005 - protein, 16 aa, Artificial sequence
  synthetic sequence
CARVEYGNSSGAFDIW

SEQ ID NO: 2006 - protein, 16 aa, Artificial sequence
  synthetic sequence
CARKSIAVAGRPFDYW

SEQ ID NO: 2007 - protein, 18 aa, Artificial sequence
  synthetic sequence
CARIRVGYNYSPDAFDIW

SEQ ID NO: 2008 - protein, 14 aa, Artificial sequence
  synthetic sequence
CAREEAAASWLEYW

SEQ ID NO: 2009 - protein, 15 aa, Artificial sequence
  synthetic sequence
CARVQRAAIGYFQYW

SEQ ID NO: 2010 - protein, 22 aa, Artificial sequence
  synthetic sequence
CARDGTRLRFLEWSLGPTFDIW

SEQ ID NO: 2011 - protein, 22 aa, Artificial sequence
  synthetic sequence
CARYITMVRGVFIQGRGWFDSW

SEQ ID NO: 2012 - protein, 25 aa, Artificial sequence
  synthetic sequence
CARDRYCSDNSCPQGRYHFYYMDVW

SEQ ID NO: 2013 - protein, 16 aa, Artificial sequence
  synthetic sequence
CARVEYGRSSGAFDYW

SEQ ID NO: 2014 - protein, 11 aa, Artificial sequence
  synthetic sequence
CTHRRRYFDYW

SEQ ID NO: 2015 - protein, 20 aa, Artificial sequence
  synthetic sequence
CAKTHSMGGIQWRAQGFDYW

SEQ ID NO: 2016 - protein, 17 aa, Artificial sequence
  synthetic sequence
CDRPSRPLLPRSAFDIW

SEQ ID NO: 2017 - protein, 18 aa, Artificial sequence
  synthetic sequence
CARQPFGGSGWFGWFDTW

SEQ ID NO: 2018 - protein, 28 aa, Artificial sequence
  synthetic sequence
CARHRRDFVVVTAGSDLSYNQYYYMDVW

SEQ ID NO: 2019 - protein, 19 aa, Artificial sequence
  synthetic sequence
CARSSHDFGDYEAEYFQHW

SEQ ID NO: 2020 - protein, 18 aa, Artificial sequence
  synthetic sequence
CARHVNMAVAGGNWFDPW

SEQ ID NO: 2021 - protein, 17 aa, Artificial sequence
  synthetic sequence
CARAHWRWFAAGPMDVW

SEQ ID NO: 2022 - protein, 27 aa, Artificial sequence
  synthetic sequence
CAHSPPPNDFWSGYYLGGGGDWYFDLW

SEQ ID NO: 2023 - protein, 16 aa, Artificial sequence
  synthetic sequence
CARDRAGFWSAYFDYW

SEQ ID NO: 2024 - protein, 15 aa, Artificial sequence
  synthetic sequence
CARDLRGYNYGLDSW

SEQ ID NO: 2025 - protein, 17 aa, Artificial sequence
  synthetic sequence
CARDSRAILNSGGLDSW

SEQ ID NO: 2026 - protein, 20 aa, Artificial sequence
  synthetic sequence
CAKGGNYYDTGSFLWGIRPL

SEQ ID NO: 2027 - protein, 22 aa, Artificial sequence
  synthetic sequence
CAREGGYCNHGNCYGMAWFDSW

SEQ ID NO: 2028 - protein, 19 aa, Artificial sequence
  synthetic sequence
CARHWRYSISGSGNWFGPW

SEQ ID NO: 2029 - protein, 20 aa, Artificial sequence
  synthetic sequence
CARISKMVYYGSESYYFDYW

SEQ ID NO: 2030 - protein, 17 aa, Artificial sequence
  synthetic sequence
CARYPSGWRLNDAFDIW

SEQ ID NO: 2031 - protein, 19 aa, Artificial sequence
  synthetic sequence
CARTEVGYGVVIVKPFDIW

SEQ ID NO: 2032 - protein, 25 aa, Artificial sequence
  synthetic sequence
CARTIDTSYYDFWSGSTTGWYFDLW

SEQ ID NO: 2033 - protein, 13 aa, Artificial sequence
  synthetic sequence
CARILVRGGFDYW

SEQ ID NO: 2034 - protein, 12 aa, Artificial sequence
  synthetic sequence
CGRHQYSWFDLW

SEQ ID NO: 2035 - protein, 20 aa, Artificial sequence
  synthetic sequence
CARDGRGNSGYDWGYYFDYW

SEQ ID NO: 2036 - protein, 20 aa, Artificial sequence
  synthetic sequence
CAHAQRRGRNNWYGSSFDMW

SEQ ID NO: 2037 - protein, 23 aa, Artificial sequence
  synthetic sequence
CARIITPSFYDFWNGYLYYFDYW

SEQ ID NO: 2038 - protein, 19 aa, Artificial sequence
  synthetic sequence
CARRGSYTLWSGYPVFDSW

SEQ ID NO: 2039 - protein, 34 aa, Artificial sequence
  synthetic sequence
CARGQLERRHGLYYDILTGSRSLRPKHQNWIDPW

SEQ ID NO: 2040 - protein, 16 aa, Artificial sequence
  synthetic sequence
CAKPAMGSIRGWFDPW

SEQ ID NO: 2041 - protein, 19 aa, Artificial sequence
  synthetic sequence
CASAQWGCSSTSCYTLDSW

SEQ ID NO: 2042 - protein, 18 aa, Artificial sequence
  synthetic sequence
CASHLPYVYFYYYYMDVW

SEQ ID NO: 2043 - protein, 16 aa, Artificial sequence
  synthetic sequence
CARMVRAGYSYYMDVW

SEQ ID NO: 2044 - protein, 21 aa, Artificial sequence
  synthetic sequence
CASAPYYDFWSGYYGDGFDIW

SEQ ID NO: 2045 - protein, 16 aa, Artificial sequence
  synthetic sequence
CAKLRGYTWNADLDYW

SEQ ID NO: 2046 - protein, 17 aa, Artificial sequence
  synthetic sequence
CAHRPYNFWSAYYFDYW

SEQ ID NO: 2047 - protein, 14 aa, Artificial sequence
  synthetic sequence
CARHLGVMYAFHIW

SEQ ID NO: 2048 - protein, 18 aa, Artificial sequence
  synthetic sequence
CARAPYYNFWSGYWFDYW

SEQ ID NO: 2049 - protein, 24 aa, Artificial sequence
  synthetic sequence
CGRVRGTVYGVLIKGRPYYYMDVW

SEQ ID NO: 2050 - protein, 13 aa, Artificial sequence
  synthetic sequence
CARGDIDTGVDSW

SEQ ID NO: 2051 - protein, 20 aa, Artificial sequence
  synthetic sequence
CARETSVMEGFYYYYNMDVW

SEQ ID NO: 2052 - protein, 18 aa, Artificial sequence
  synthetic sequence
CARLLIGYQFLPYYFDNW

SEQ ID NO: 2053 - protein, 28 aa, Artificial sequence
  synthetic sequence
CARDVRWEGLPDIVVVPAATHEFHMDVW

SEQ ID NO: 2054 - protein, 20 aa, Artificial sequence
  synthetic sequence
CARAFTGHPDYDFWRWFDPW

SEQ ID NO: 2055 - protein, 27 aa, Artificial sequence
  synthetic sequence
CARGRRGDFWTTSFREGSTRLEYFDYW

SEQ ID NO: 2056 - protein, 19 aa, Artificial sequence
  synthetic sequence
CARDATSNYVHYYYYMDIW

SEQ ID NO: 2057 - protein, 18 aa, Artificial sequence
  synthetic sequence
CARDVEILVNPGHWFDPW

SEQ ID NO: 2058 - protein, 20 aa, Artificial sequence
  synthetic sequence
CARISNYDFWSGSYDAFDIW

SEQ ID NO: 2059 - protein, 23 aa, Artificial sequence
  synthetic sequence
CAHSGERCTGGRCYYFNDAFDIW

SEQ ID NO: 2060 - protein, 13 aa, Artificial sequence
  synthetic sequence
CARDMSGYYVDSW

SEQ ID NO: 2061 - protein, 17 aa, Artificial sequence
  synthetic sequence
CARGLCSGTYCPYFDYW

SEQ ID NO: 2062 - protein, 17 aa, Artificial sequence
  synthetic sequence
CARPNDILTGFYAFDLW

SEQ ID NO: 2063 - protein, 24 aa, Artificial sequence
  synthetic sequence
CAREMTLSEMWRRSPQYYYYMDVW

SEQ ID NO: 2064 - protein, 28 aa, Artificial sequence
  synthetic sequence
CARDVRWEGLPDIVVVPAATRDYYMDVW

SEQ ID NO: 2065 - protein, 14 aa, Artificial sequence
  synthetic sequence
CARQNMPSRSLDSW

SEQ ID NO: 2066 - protein, 12 aa, Artificial sequence
  synthetic sequence
CARLVWRVSDYW

SEQ ID NO: 2067 - protein, 17 aa, Artificial sequence
  synthetic sequence
CANGALRFLEWLYFDYW

SEQ ID NO: 2068 - protein, 25 aa, Artificial sequence
  synthetic sequence
CARDLRPISFLGVDPNYYYLHMDVW

SEQ ID NO: 2069 - protein, 22 aa, Artificial sequence
  synthetic sequence
CVRDPLGIDLRNITIFFVLLLL

SEQ ID NO: 2070 - protein, 19 aa, Artificial sequence
  synthetic sequence
CARVRLSSSGWYVGFADYW

SEQ ID NO: 2071 - protein, 18 aa, Artificial sequence
  synthetic sequence
CAKDGTPGHFWSGYLDYW

SEQ ID NO: 2072 - protein, 20 aa, Artificial sequence
  synthetic sequence
CARAVTRWGFGDRNTWFDPW

SEQ ID NO: 2073 - protein, 19 aa, Artificial sequence
  synthetic sequence
CARGGEGGIWSGYNLFDYW

SEQ ID NO: 2074 - protein, 14 aa, Artificial sequence
  synthetic sequence
CAREATGESMLDYW

SEQ ID NO: 2075 - protein, 24 aa, Artificial sequence
  synthetic sequence
CARLAIYCDGGGCYSTNYNWFGPW

SEQ ID NO: 2076 - protein, 19 aa, Artificial sequence
  synthetic sequence
CASLSYDFWSGYSPPFDYW

SEQ ID NO: 2077 - protein, 17 aa, Artificial sequence
  synthetic sequence
CARTEVSGFGVETFDPW

SEQ ID NO: 2078 - protein, 19 aa, Artificial sequence
  synthetic sequence
CSRGDYDFWSGYRNLFDYW

SEQ ID NO: 2079 - protein, 16 aa, Artificial sequence
  synthetic sequence
CAHSSPAAMGGGMDVW

SEQ ID NO: 2080 - protein, 25 aa, Artificial sequence
  synthetic sequence
CARGTGWNSGCYWGDCFSPPFFDIW

SEQ ID NO: 2081 - protein, 18 aa, Artificial sequence
  synthetic sequence
CARGPYCSGTNCLGFDYW

SEQ ID NO: 2082 - protein, 15 aa, Artificial sequence
  synthetic sequence
CARDLRGYSYGLDHW

SEQ ID NO: 2083 - protein, 23 aa, Artificial sequence
  synthetic sequence
CARDDIVVVPAAISPTYNWFDPW

SEQ ID NO: 2084 - protein, 17 aa, Artificial sequence
  synthetic sequence
CASLTFDYSSPYYFDYW

SEQ ID NO: 2085 - protein, 20 aa, Artificial sequence
  synthetic sequence
CAHTSNHNRRGYYNGAFDYW

SEQ ID NO: 2086 - protein, 23 aa, Artificial sequence
  synthetic sequence
CARDRPDKYRAWGYQYFYGLDVW

SEQ ID NO: 2087 - protein, 25 aa, Artificial sequence
  synthetic sequence
CARDLRPISFLGVVPNYYYLHMDVW

SEQ ID NO: 2088 - protein, 14 aa, Artificial sequence
  synthetic sequence
CARHLGVMYAFNIW

SEQ ID NO: 2089 - protein, 14 aa, Artificial sequence
  synthetic sequence
CAIQKTVTVPFDYW

SEQ ID NO: 2090 - protein, 18 aa, Artificial sequence
  synthetic sequence
CARDSSSWYYYYYYMDVW

SEQ ID NO: 2091 - protein, 22 aa, Artificial sequence
  synthetic sequence
CARALDFDMWTPDYLHRSFDYW

SEQ ID NO: 2092 - protein, 18 aa, Artificial sequence
  synthetic sequence
CARIQEGAATVVGAFDIW

SEQ ID NO: 2093 - protein, 22 aa, Artificial sequence
  synthetic sequence
CARRYSAYDSRGHYHYYALDVW

SEQ ID NO: 2094 - protein, 20 aa, Artificial sequence
  synthetic sequence
CARDSTLLWFGELEDYFDYW

SEQ ID NO: 2095 - protein, 29 aa, Artificial sequence
  synthetic sequence
CTRHLQGFLWSEDGHSATVVTTTTTLWTS

SEQ ID NO: 2096 - protein, 21 aa, Artificial sequence
  synthetic sequence
CAREGYYSSGSYYNVDAFDIW

SEQ ID NO: 2097 - protein, 21 aa, Artificial sequence
  synthetic sequence
CARHEHCGSPNCYEVGLFDPW

SEQ ID NO: 2098 - protein, 25 aa, Artificial sequence
  synthetic sequence
CARDLRPISFPGVVPKLLLPPHGRL

SEQ ID NO: 2099 - protein, 18 aa, Artificial sequence
  synthetic sequence
CARVVSDGDFWSGYWAYW

SEQ ID NO: 2100 - protein, 16 aa, Artificial sequence
  synthetic sequence
CARVEYGRSSGAFDVW

SEQ ID NO: 2101 - protein, 15 aa, Artificial sequence
  synthetic sequence
CARGADYYGSGGLHW

SEQ ID NO: 2102 - protein, 27 aa, Artificial sequence
  synthetic sequence
CARRAGEYLRLWTRTPQNYYYYYMDVW

SEQ ID NO: 2103 - protein, 16 aa, Artificial sequence
  synthetic sequence
CATLGGGYVRNLYDYW

SEQ ID NO: 2104 - protein, 16 aa, Artificial sequence
  synthetic sequence
CARMVREGYSYYMDVW

SEQ ID NO: 2105 - protein, 16 aa, Artificial sequence
  synthetic sequence
CARGHVVGWLRPFDSW

SEQ ID NO: 2106 - protein, 28 aa, Artificial sequence
  synthetic sequence
CARDVRWEGLPNIVVLPVPKQDFYMDVW

SEQ ID NO: 2107 - protein, 14 aa, Artificial sequence
  synthetic sequence
CASSPQVWLPFDYW

SEQ ID NO: 2108 - protein, 14 aa, Artificial sequence
  synthetic sequence
CARDLSGGDAFDIW

SEQ ID NO: 2109 - protein, 18 aa, Artificial sequence
  synthetic sequence
CAKGVVVLPPASNWFDPW

SEQ ID NO: 2110 - protein, 14 aa, Artificial sequence
  synthetic sequence
CARDFYPFWYFDLW

SEQ ID NO: 2111 - protein, 15 aa, Artificial sequence
  synthetic sequence
CARGGSGWYLTSDYW

SEQ ID NO: 2112 - protein, 23 aa, Artificial sequence
  synthetic sequence
CATSLRPLVRGLFSPRYNWFDPW

SEQ ID NO: 2113 - protein, 19 aa, Artificial sequence
  synthetic sequence
CAKEGDFWSGYYSGYFDLW

SEQ ID NO: 2114 - protein, 14 aa, Artificial sequence
  synthetic sequence
CARHIRGGFHMDVW

SEQ ID NO: 2115 - protein, 18 aa, Artificial sequence
  synthetic sequence
CARVEDFGVIIPGFFDYW

SEQ ID NO: 2116 - protein, 18 aa, Artificial sequence
  synthetic sequence
CARIRVGYNYSPDAFDLW

SEQ ID NO: 2117 - protein, 24 aa, Artificial sequence
  synthetic sequence
CARHPFDFWSGDYTEKGYNWFDPW

SEQ ID NO: 2118 - protein, 24 aa, Artificial sequence
  synthetic sequence
CARGFGGNGDSSLSRRRNYGMDVW

SEQ ID NO: 2119 - protein, 13 aa, Artificial sequence
  synthetic sequence
CARTTTVFGVEPW

SEQ ID NO: 2120 - protein, 22 aa, Artificial sequence
  synthetic sequence
CARDGIYNWNDAPHVPVMFDSW

SEQ ID NO: 2121 - protein, 15 aa, Artificial sequence
  synthetic sequence
CARDLRGYNYGLDNW

SEQ ID NO: 2122 - protein, 21 aa, Artificial sequence
  synthetic sequence
CARELVVLVGATRANDALHFW

SEQ ID NO: 2123 - protein, 22 aa, Artificial sequence
  synthetic sequence
CARVGGSSCGYNWNDCGWVDPW

SEQ ID NO: 2124 - protein, 22 aa, Artificial sequence
  synthetic sequence
CARRYSAYDSRGQYHYYAMDVW

SEQ ID NO: 2125 - protein, 23 aa, Artificial sequence
  synthetic sequence
CARGLPNYDLLTGSSPYNWFDPW

SEQ ID NO: 2126 - protein, 14 aa, Artificial sequence
  synthetic sequence
CTTDFSYTSGWNYW

SEQ ID NO: 2127 - protein, 29 aa, Artificial sequence
  synthetic sequence
CARMGVNRGFLGWGGPSRHPYYYYGLDVW

SEQ ID NO: 2128 - protein, 21 aa, Artificial sequence
  synthetic sequence
CARVAGDIVGVSDATVWFAPW

SEQ ID NO: 2129 - protein, 17 aa, Artificial sequence
  synthetic sequence
CAKGIPWEDIVDAFDIW

SEQ ID NO: 2130 - protein, 17 aa, Artificial sequence
  synthetic sequence
CARGAFFGLGYNWFDPW

SEQ ID NO: 2131 - protein, 19 aa, Artificial sequence
  synthetic sequence
CAKDRYYYESSGYYLFDYW

SEQ ID NO: 2132 - protein, 12 aa, Artificial sequence
  synthetic sequence
CARAHSYAAWEW

SEQ ID NO: 2133 - protein, 15 aa, Artificial sequence
  synthetic sequence
CVREVIIGYQWFDPW

SEQ ID NO: 2134 - protein, 22 aa, Artificial sequence
  synthetic sequence
CTRPTAVHQLLYRRLPNWFDSW

SEQ ID NO: 2135 - protein, 25 aa, Artificial sequence
  synthetic sequence
CARALPTIGYCTGGNCYARWWFDPW

SEQ ID NO: 2136 - protein, 22 aa, Artificial sequence
  synthetic sequence
CARDGAPLRFLEWLQLHWFDPW

SEQ ID NO: 2137 - protein, 9 aa, Artificial sequence
  synthetic sequence
GVRGSALTT

SEQ ID NO: 2138 - protein, 14 aa, Artificial sequence
  synthetic sequence
CVRPTIRVGWFDPW

SEQ ID NO: 2139 - protein, 28 aa, Artificial sequence
  synthetic sequence
CARARIVSLPAAIRWGSDTYYYYYMDVW

SEQ ID NO: 2140 - protein, 16 aa, Artificial sequence
  synthetic sequence
CATDLWAGSSSIGDYW

SEQ ID NO: 2141 - protein, 24 aa, Artificial sequence
  synthetic sequence
CARDHRCSSTSCQRDYYYYYMDVW

SEQ ID NO: 2142 - protein, 15 aa, Artificial sequence
  synthetic sequence
CARTSGGYLADFDSW

SEQ ID NO: 2143 - protein, 19 aa, Artificial sequence
  synthetic sequence
CAKAEIYDFWNAYDAFDMW

SEQ ID NO: 2144 - protein, 14 aa, Artificial sequence
  synthetic sequence
CARRLWGGSAFDIW

SEQ ID NO: 2145 - protein, 31 aa, Artificial sequence
  synthetic sequence
CARDRGGFPKGGGGTLSWGRPSYYSYGMDVW

SEQ ID NO: 2146 - protein, 22 aa, Artificial sequence
  synthetic sequence
CARDGTRLRFLEWSLGPTLDIW

SEQ ID NO: 2147 - protein, 18 aa, Artificial sequence
  synthetic sequence
CVSGRDFDSTYYYGLDVW

SEQ ID NO: 2148 - protein, 25 aa, Artificial sequence
  synthetic sequence
CARATPQFQQLWQRYEGWDNWFDPW

SEQ ID NO: 2149 - protein, 18 aa, Artificial sequence
  synthetic sequence
CARIRGSSCLLTGAFGIW

SEQ ID NO: 2150 - protein, 15 aa, Artificial sequence
  synthetic sequence
CARDISSTYNWLDPW

SEQ ID NO: 2151 - protein, 16 aa, Artificial sequence
  synthetic sequence
CARDHGFWSGYYFDYW

SEQ ID NO: 2152 - protein, 24 aa, Artificial sequence
  synthetic sequence
CARVRISLFRGAKWGLSTATVWTS

SEQ ID NO: 2153 - protein, 21 aa, Artificial sequence
  synthetic sequence
CARGMTVPGTGYYYYYYMDVW

SEQ ID NO: 2154 - protein, 17 aa, Artificial sequence
  synthetic sequence
CARDQTNTWPGDAFDVW

SEQ ID NO: 2155 - protein, 16 aa, Artificial sequence
  synthetic sequence
CARDLTTGTENGFDIW

SEQ ID NO: 2156 - protein, 18 aa, Artificial sequence
  synthetic sequence
CAKDRQNYGDYGTSPDYW

SEQ ID NO: 2157 - protein, 16 aa, Artificial sequence
  synthetic sequence
CARHGRYYDSGTYTYW

SEQ ID NO: 2158 - protein, 19 aa, Artificial sequence
  synthetic sequence
CATEARCPGDCYAGSFDYW

SEQ ID NO: 2159 - protein, 23 aa, Artificial sequence
  synthetic sequence
CARTTERCTGGRCYNFNDVFDIW

SEQ ID NO: 2160 - protein, 20 aa, Artificial sequence
  synthetic sequence
CATRWRGNLRSGDYYYMDVW

SEQ ID NO: 2161 - protein, 18 aa, Artificial sequence
  synthetic sequence
CARQSSMYAGGPEWFDPW

SEQ ID NO: 2162 - protein, 18 aa, Artificial sequence
  synthetic sequence
CARIRVGYNYSPDAFDFW

SEQ ID NO: 2163 - protein, 13 aa, Artificial sequence
  synthetic sequence
CARGSGYWDFDYW

SEQ ID NO: 2164 - protein, 18 aa, Artificial sequence
  synthetic sequence
CARDGAPRWDYYFYMDVW

SEQ ID NO: 2165 - protein, 20 aa, Artificial sequence
  synthetic sequence
CGRDPWATYSDYVTGWFDPW

SEQ ID NO: 2166 - protein, 24 aa, Artificial sequence
  synthetic sequence
CASQALGERSVVRGVIGRLVMDVW

SEQ ID NO: 2167 - protein, 20 aa, Artificial sequence
  synthetic sequence
CVRPYCSRTSCYGGHAFDIW

SEQ ID NO: 2168 - protein, 7 aa, Artificial sequence
  synthetic sequence
QSVSSSY

SEQ ID NO: 2169 - protein, 9 aa, Artificial sequence
  synthetic sequence
SSDVGGYNY

SEQ ID NO: 2170 - protein, 8 aa, Artificial sequence
  synthetic sequence
TANIGDNY

SEQ ID NO: 2171 - protein, 6 aa, Artificial sequence
  synthetic sequence
QSISNW

SEQ ID NO: 2172 - protein, 6 aa, Artificial sequence
  synthetic sequence
SLRSYD

SEQ ID NO: 2173 - protein, 9 aa, Artificial sequence
  synthetic sequence
SSDIGGYKY

SEQ ID NO: 2174 - protein, 6 aa, Artificial sequence
  synthetic sequence
QSVSSN

SEQ ID NO: 2175 - protein, 9 aa, Artificial sequence
  synthetic sequence
SSDVGSYNL

SEQ ID NO: 2176 - protein, 8 aa, Artificial sequence
  synthetic sequence
SSDIGGYK

SEQ ID NO: 2177 - protein, 7 aa, Artificial sequence
  synthetic sequence
QSVSSSD

SEQ ID NO: 2178 - protein, 6 aa, Artificial sequence
  synthetic sequence
QGIRND

SEQ ID NO: 2179 - protein, 6 aa, Artificial sequence
  synthetic sequence
SLRNYY

SEQ ID NO: 2180 - protein, 11 aa, Artificial sequence
  synthetic sequence
QSLVYSDGNTY

SEQ ID NO: 2181 - protein, 7 aa, Artificial sequence
  synthetic sequence
QSVSNNF

SEQ ID NO: 2182 - protein, 6 aa, Artificial sequence
  synthetic sequence
QDIRNY

SEQ ID NO: 2183 - protein, 6 aa, Artificial sequence
  synthetic sequence
QNINTF

SEQ ID NO: 2184 - protein, 6 aa, Artificial sequence
  synthetic sequence
HDITKY

SEQ ID NO: 2185 - protein, 11 aa, Artificial sequence
  synthetic sequence
RSLLHKNQYHF

SEQ ID NO: 2186 - protein, 11 aa, Artificial sequence
  synthetic sequence
QSLLHSNGYNY

SEQ ID NO: 2187 - protein, 6 aa, Artificial sequence
  synthetic sequence
QDISNY

SEQ ID NO: 2188 - protein, 12 aa, Artificial sequence
  synthetic sequence
QSVLYSSNNKNF

SEQ ID NO: 2189 - protein, 6 aa, Artificial sequence
  synthetic sequence
QSVSRF

SEQ ID NO: 2190 - protein, 6 aa, Artificial sequence
  synthetic sequence
QSISNY

SEQ ID NO: 2191 - protein, 6 aa, Artificial sequence
  synthetic sequence
QSIDNW

SEQ ID NO: 2192 - protein, 6 aa, Artificial sequence
  synthetic sequence
QTIYTW

SEQ ID NO: 2193 - protein, 6 aa, Artificial sequence
  synthetic sequence
HDISNY

SEQ ID NO: 2194 - protein, 6 aa, Artificial sequence
  synthetic sequence
QSIDRY

SEQ ID NO: 2195 - protein, 6 aa, Artificial sequence
  synthetic sequence
QSVSSY

SEQ ID NO: 2196 - protein, 9 aa, Artificial sequence
  synthetic sequence
TGAVTSGYY

SEQ ID NO: 2197 - protein, 9 aa, Artificial sequence
  synthetic sequence
SSDVGSYNY

SEQ ID NO: 2198 - protein, 9 aa, Artificial sequence
  synthetic sequence
SSDVGAYKF

SEQ ID NO: 2199 - protein, 6 aa, Artificial sequence
  synthetic sequence
QSISDY

SEQ ID NO: 2200 - protein, 6 aa, Artificial sequence
  synthetic sequence
QSIDTW

SEQ ID NO: 2201 - protein, 12 aa, Artificial sequence
  synthetic sequence
QSVLYRSNNKNF

SEQ ID NO: 2202 - protein, 8 aa, Artificial sequence
  synthetic sequence
GSNIGSNS

SEQ ID NO: 2203 - protein, 6 aa, Artificial sequence
  synthetic sequence
QGISSW

SEQ ID NO: 2204 - protein, 6 aa, Artificial sequence
  synthetic sequence
QSVSTW

SEQ ID NO: 2205 - protein, 11 aa, Artificial sequence
  synthetic sequence
QSLVHSDGNTY

SEQ ID NO: 2206 - protein, 6 aa, Artificial sequence
  synthetic sequence
QDISTH

SEQ ID NO: 2207 - protein, 8 aa, Artificial sequence
  synthetic sequence
NSNIGKNF

SEQ ID NO: 2208 - protein, 8 aa, Artificial sequence
  synthetic sequence
SSNIGSNY

SEQ ID NO: 2209 - protein, 6 aa, Artificial sequence
  synthetic sequence
QGTSTY

SEQ ID NO: 2210 - protein, 6 aa, Artificial sequence
  synthetic sequence
QSVSVY

SEQ ID NO: 2211 - protein, 6 aa, Artificial sequence
  synthetic sequence
KLDDKY

SEQ ID NO: 2212 - protein, 8 aa, Artificial sequence
  synthetic sequence
SSNVGGNT

SEQ ID NO: 2213 - protein, 6 aa, Artificial sequence
  synthetic sequence
ENISRY

SEQ ID NO: 2214 - protein, 6 aa, Artificial sequence
  synthetic sequence
EGIGNS

SEQ ID NO: 2215 - protein, 8 aa, Artificial sequence
  synthetic sequence
SGSIASNY

SEQ ID NO: 2216 - protein, 6 aa, Artificial sequence
  synthetic sequence
QDIRKY

SEQ ID NO: 2217 - protein, 6 aa, Artificial sequence
  synthetic sequence
NIGSKS

SEQ ID NO: 2218 - protein, 12 aa, Artificial sequence
  synthetic sequence
QSVLYSSNNKNY

SEQ ID NO: 2219 - protein, 6 aa, Artificial sequence
  synthetic sequence
QLGHKY

SEQ ID NO: 2220 - protein, 6 aa, Artificial sequence
  synthetic sequence
SLRTYY

SEQ ID NO: 2221 - protein, 6 aa, Artificial sequence
  synthetic sequence
QSISSW

SEQ ID NO: 2222 - protein, 6 aa, Artificial sequence
  synthetic sequence
QDINNY

SEQ ID NO: 2223 - protein, 6 aa, Artificial sequence
  synthetic sequence
QSISTW

SEQ ID NO: 2224 - protein, 6 aa, Artificial sequence
  synthetic sequence
QSISSD

SEQ ID NO: 2225 - protein, 6 aa, Artificial sequence
  synthetic sequence
QSIRSY

SEQ ID NO: 2226 - protein, 8 aa, Artificial sequence
  synthetic sequence
SSNIGANY

SEQ ID NO: 2227 - protein, 9 aa, Artificial sequence
  synthetic sequence
SNDVGGYDY

SEQ ID NO: 2228 - protein, 6 aa, Artificial sequence
  synthetic sequence
QSISSY

SEQ ID NO: 2229 - protein, 8 aa, Artificial sequence
  synthetic sequence
SSNIEDNT

SEQ ID NO: 2230 - protein, 10 aa, Artificial sequence
  synthetic sequence
QSLDSNGYNY

SEQ ID NO: 2231 - protein, 6 aa, Artificial sequence
  synthetic sequence
QTISTS

SEQ ID NO: 2232 - protein, 8 aa, Artificial sequence
  synthetic sequence
DSNIGVNY

SEQ ID NO: 2233 - protein, 7 aa, Artificial sequence
  synthetic sequence
QTIRSNF

SEQ ID NO: 2234 - protein, 9 aa, Artificial sequence
  synthetic sequence
SSDVRAYDY

SEQ ID NO: 2235 - protein, 6 aa, Artificial sequence
  synthetic sequence
QGISNY

SEQ ID NO: 2236 - protein, 6 aa, Artificial sequence
  synthetic sequence
QSVSSD

SEQ ID NO: 2237 - protein, 6 aa, Artificial sequence
  synthetic sequence
QDISSF

SEQ ID NO: 2238 - protein, 10 aa, Artificial sequence
  synthetic sequence
QNLHINGYNY

SEQ ID NO: 2239 - protein, 11 aa, Artificial sequence
  synthetic sequence
QSLLHNNGYKY

SEQ ID NO: 2240 - protein, 8 aa, Artificial sequence
  synthetic sequence
GSNIGSNY

SEQ ID NO: 2241 - protein, 9 aa, Artificial sequence
  synthetic sequence
GSDVGSYNY

SEQ ID NO: 2242 - protein, 6 aa, Artificial sequence
  synthetic sequence
QSIGSS

SEQ ID NO: 2243 - protein, 6 aa, Artificial sequence
  synthetic sequence
HSISDY

SEQ ID NO: 2244 - protein, 6 aa, Artificial sequence
  synthetic sequence
QSFNNW

SEQ ID NO: 2245 - protein, 6 aa, Artificial sequence
  synthetic sequence
QGISSY

SEQ ID NO: 2246 - protein, 6 aa, Artificial sequence
  synthetic sequence
QSVRAN

SEQ ID NO: 2247 - protein, 6 aa, Artificial sequence
  synthetic sequence
QSVSGS

SEQ ID NO: 2248 - protein, 6 aa, Artificial sequence
  synthetic sequence
QSISRY

SEQ ID NO: 2249 - protein, 8 aa, Artificial sequence
  synthetic sequence
SSNIGNNY

SEQ ID NO: 2250 - protein, 12 aa, Artificial sequence
  synthetic sequence
QSVLTRSNNKNY

SEQ ID NO: 2251 - protein, 6 aa, Artificial sequence
  synthetic sequence
QNLRSN

SEQ ID NO: 2252 - protein, 11 aa, Artificial sequence
  synthetic sequence
QSLLYVNGYNY

SEQ ID NO: 2253 - protein, 6 aa, Artificial sequence
  synthetic sequence
QGIRSY

SEQ ID NO: 2254 - protein, 11 aa, Artificial sequence
  synthetic sequence
QSLLHSNGNNY

SEQ ID NO: 2255 - protein, 6 aa, Artificial sequence
  synthetic sequence
NFVITS

SEQ ID NO: 2256 - protein, 12 aa, Artificial sequence
  synthetic sequence
QSVLYNSNNKNY

SEQ ID NO: 2257 - protein, 8 aa, Artificial sequence
  synthetic sequence
SSNIGTNP

SEQ ID NO: 2258 - protein, 6 aa, Artificial sequence
  synthetic sequence
QTISKW

SEQ ID NO: 2259 - protein, 11 aa, Artificial sequence
  synthetic sequence
QSLLHSNGHHY

SEQ ID NO: 2260 - protein, 6 aa, Artificial sequence
  synthetic sequence
QGVTRW

SEQ ID NO: 2261 - protein, 6 aa, Artificial sequence
  synthetic sequence
QDITNY

SEQ ID NO: 2262 - protein, 12 aa, Artificial sequence
  synthetic sequence
QNILYGSNNKNH

SEQ ID NO: 2263 - protein, 6 aa, Artificial sequence
  synthetic sequence
QSVSTY

SEQ ID NO: 2264 - protein, 11 aa, Artificial sequence
  synthetic sequence
RILLHSDGHNY

SEQ ID NO: 2265 - protein, 6 aa, Artificial sequence
  synthetic sequence
EGISNW

SEQ ID NO: 2266 - protein, 6 aa, Artificial sequence
  synthetic sequence
QGISNL

SEQ ID NO: 2267 - protein, 6 aa, Artificial sequence
  synthetic sequence
QRISTW

SEQ ID NO: 2268 - protein, 8 aa, Artificial sequence
  synthetic sequence
RSNIGSNS

SEQ ID NO: 2269 - protein, 8 aa, Artificial sequence
  synthetic sequence
TSNVGSHP

SEQ ID NO: 2270 - protein, 6 aa, Artificial sequence
  synthetic sequence
QSVTSN

SEQ ID NO: 2271 - protein, 6 aa, Artificial sequence
  synthetic sequence
QGISKW

SEQ ID NO: 2272 - protein, 6 aa, Artificial sequence
  synthetic sequence
NIGRQS

SEQ ID NO: 2273 - protein, 12 aa, Artificial sequence
  synthetic sequence
QTVLYSSNNKNY

SEQ ID NO: 2274 - protein, 8 aa, Artificial sequence
  synthetic sequence
ISNIGSNS

SEQ ID NO: 2275 - protein, 12 aa, Artificial sequence
  synthetic sequence
QSVLYSSNDKNY

SEQ ID NO: 2276 - protein, 7 aa, Artificial sequence
  synthetic sequence
QSVSSNY

SEQ ID NO: 2277 - protein, 7 aa, Artificial sequence
  synthetic sequence
QSISSSY

SEQ ID NO: 2278 - protein, 8 aa, Artificial sequence
  synthetic sequence
SSNIGINT

SEQ ID NO: 2279 - protein, 7 aa, Artificial sequence
  synthetic sequence
QSIRSNY

SEQ ID NO: 2280 - protein, 6 aa, Artificial sequence
  synthetic sequence
QSMSTY

SEQ ID NO: 2281 - protein, 6 aa, Artificial sequence
  synthetic sequence
QTIDNF

SEQ ID NO: 2282 - protein, 9 aa, Artificial sequence
  synthetic sequence
TNDFGDYNY

SEQ ID NO: 2283 - protein, 6 aa, Artificial sequence
  synthetic sequence
ALPKQY

SEQ ID NO: 2284 - protein, 6 aa, Artificial sequence
  synthetic sequence
QGITKY

SEQ ID NO: 2285 - protein, 7 aa, Artificial sequence
  synthetic sequence
QSVSGSS

SEQ ID NO: 2286 - protein, 6 aa, Artificial sequence
  synthetic sequence
KLGDNY

SEQ ID NO: 2287 - protein, 6 aa, Artificial sequence
  synthetic sequence
QGIGNL

SEQ ID NO: 2288 - protein, 7 aa, Artificial sequence
  synthetic sequence
QTVSSNF

SEQ ID NO: 2289 - protein, 6 aa, Artificial sequence
  synthetic sequence
QDISNS

SEQ ID NO: 2290 - protein, 11 aa, Artificial sequence
  synthetic sequence
QSLLHSDGNTY

SEQ ID NO: 2291 - protein, 6 aa, Artificial sequence
  synthetic sequence
QSISRW

SEQ ID NO: 2292 - protein, 6 aa, Artificial sequence
  synthetic sequence
ALPKKF

SEQ ID NO: 2293 - protein, 8 aa, Artificial sequence
  synthetic sequence
SSNVVSNS

SEQ ID NO: 2294 - protein, 7 aa, Artificial sequence
  synthetic sequence
QSVSSSF

SEQ ID NO: 2295 - protein, 9 aa, Artificial sequence
  synthetic sequence
SGSVSTSYH

SEQ ID NO: 2296 - protein, 6 aa, Artificial sequence
  synthetic sequence
QNINNY

SEQ ID NO: 2297 - protein, 7 aa, Artificial sequence
  synthetic sequence
SGHSTYA

SEQ ID NO: 2298 - protein, 6 aa, Artificial sequence
  synthetic sequence
QSISTY

SEQ ID NO: 2299 - protein, 6 aa, Artificial sequence
  synthetic sequence
QGINNR

SEQ ID NO: 2300 - protein, 8 aa, Artificial sequence
  synthetic sequence
NSNIGRNS

SEQ ID NO: 2301 - protein, 9 aa, Artificial sequence
  synthetic sequence
SSDIGGYNY

SEQ ID NO: 2302 - protein, 6 aa, Artificial sequence
  synthetic sequence
ALPKKY

SEQ ID NO: 2303 - protein, 8 aa, Artificial sequence
  synthetic sequence
SSNIGNNL

SEQ ID NO: 2304 - protein, 8 aa, Artificial sequence
  synthetic sequence
SSNIGDNF

SEQ ID NO: 2305 - protein, 6 aa, Artificial sequence
  synthetic sequence
QTVSKS

SEQ ID NO: 2306 - protein, 9 aa, Artificial sequence
  synthetic sequence
SSNIGAGSD

SEQ ID NO: 2307 - protein, 6 aa, Artificial sequence
  synthetic sequence
QYVSIN

SEQ ID NO: 2308 - protein, 6 aa, Artificial sequence
  synthetic sequence
QGIDNY

SEQ ID NO: 2309 - protein, 9 aa, Artificial sequence
  synthetic sequence
SSNIGAGYD

SEQ ID NO: 2310 - protein, 6 aa, Artificial sequence
  synthetic sequence
QSIGTY

SEQ ID NO: 2311 - protein, 8 aa, Artificial sequence
  synthetic sequence
TSNIGSNP

SEQ ID NO: 2312 - protein, 6 aa, Artificial sequence
  synthetic sequence
QSISHW

SEQ ID NO: 2313 - protein, 6 aa, Artificial sequence
  synthetic sequence
QSIINY

SEQ ID NO: 2314 - protein, 9 aa, Artificial sequence
  synthetic sequence
SGINVDTYR

SEQ ID NO: 2315 - protein, 6 aa, Artificial sequence
  synthetic sequence
QGIRNY

SEQ ID NO: 2316 - protein, 6 aa, Artificial sequence
  synthetic sequence
QSINNW

SEQ ID NO: 2317 - protein, 6 aa, Artificial sequence
  synthetic sequence
SLRSYY

SEQ ID NO: 2318 - protein, 6 aa, Artificial sequence
  synthetic sequence
QDISNF

SEQ ID NO: 2319 - protein, 7 aa, Artificial sequence
  synthetic sequence
QSISSYY

SEQ ID NO: 2320 - protein, 9 aa, Artificial sequence
  synthetic sequence
SIDIVSHNY

SEQ ID NO: 2321 - protein, 6 aa, Artificial sequence
  synthetic sequence
QSFSTW

SEQ ID NO: 2322 - protein, 11 aa, Artificial sequence
  synthetic sequence
QSLLQSNGYNY

SEQ ID NO: 2323 - protein, 6 aa, Artificial sequence
  synthetic sequence
QDISDY

SEQ ID NO: 2324 - protein, 6 aa, Artificial sequence
  synthetic sequence
QDIDTW

SEQ ID NO: 2325 - protein, 11 aa, Artificial sequence
  synthetic sequence
QSLLESNGYNY

SEQ ID NO: 2326 - protein, 6 aa, Artificial sequence
  synthetic sequence
KLGDKY

SEQ ID NO: 2327 - protein, 6 aa, Artificial sequence
  synthetic sequence
QTITTY

SEQ ID NO: 2328 - protein, 12 aa, Artificial sequence
  synthetic sequence
QNILYGSNNKNY

SEQ ID NO: 2329 - protein, 6 aa, Artificial sequence
  synthetic sequence
NIGSKN

SEQ ID NO: 2330 - protein, 8 aa, Artificial sequence
  synthetic sequence
SSNIGSNF

SEQ ID NO: 2331 - protein, 6 aa, Artificial sequence
  synthetic sequence
QGIGNY

SEQ ID NO: 2332 - protein, 11 aa, Artificial sequence
  synthetic sequence
QSLLHSFGDNY

SEQ ID NO: 2333 - protein, 6 aa, Artificial sequence
  synthetic sequence
ETIDNY

SEQ ID NO: 2334 - protein, 8 aa, Artificial sequence
  synthetic sequence
TSNIETNY

SEQ ID NO: 2335 - protein, 12 aa, Artificial sequence
  synthetic sequence
QSILYSSNNKNF

SEQ ID NO: 2336 - protein, 6 aa, Artificial sequence
  synthetic sequence
EDVITE

SEQ ID NO: 2337 - protein, 9 aa, Artificial sequence
  synthetic sequence
ISNIGAGYD

SEQ ID NO: 2338 - protein, 6 aa, Artificial sequence
  synthetic sequence
QSIGNW

SEQ ID NO: 2339 - protein, 9 aa, Artificial sequence
  synthetic sequence
NSDVGAYNY

SEQ ID NO: 2340 - protein, 11 aa, Artificial sequence
  synthetic sequence
QSLLHGFGANY

SEQ ID NO: 2341 - protein, 6 aa, Artificial sequence
  synthetic sequence
QSINSW

SEQ ID NO: 2342 - protein, 8 aa, Artificial sequence
  synthetic sequence
PASLSSSP

SEQ ID NO: 2343 - protein, 7 aa, Artificial sequence
  synthetic sequence
QSVSSTY

SEQ ID NO: 2344 - protein, 12 aa, Artificial sequence
  synthetic sequence
QTILYSSNNKNY

SEQ ID NO: 2345 - protein, 6 aa, Artificial sequence
  synthetic sequence
QTISTY

SEQ ID NO: 2346 - protein, 6 aa, Artificial sequence
  synthetic sequence
YFGTKS

SEQ ID NO: 2347 - protein, 9 aa, Artificial sequence
  synthetic sequence
TSDVGGYDY

SEQ ID NO: 2348 - protein, 9 aa, Artificial sequence
  synthetic sequence
SSDVGNYNL

SEQ ID NO: 2349 - protein, 8 aa, Artificial sequence
  synthetic sequence
TSNIGDNF

SEQ ID NO: 2350 - protein, 6 aa, Artificial sequence
  synthetic sequence
ILANKY

SEQ ID NO: 2351 - protein, 9 aa, Artificial sequence
  synthetic sequence
SSDVGGHDF

SEQ ID NO: 2352 - protein, 9 aa, Artificial sequence
  synthetic sequence
SSDIGAGYD

SEQ ID NO: 2353 - protein, 12 aa, Artificial sequence
  synthetic sequence
RSVFYSSNNKNY

SEQ ID NO: 2354 - protein, 7 aa, Artificial sequence
  synthetic sequence
ERINTNT

SEQ ID NO: 2355 - protein, 6 aa, Artificial sequence
  synthetic sequence
HSISSY

SEQ ID NO: 2356 - protein, 11 aa, Artificial sequence
  synthetic sequence
QSVVHSDGNTY

SEQ ID NO: 2357 - protein, 11 aa, Artificial sequence
  synthetic sequence
QSLLHSHGYNY

SEQ ID NO: 2358 - protein, 8 aa, Artificial sequence
  synthetic sequence
SSNIGYNS

SEQ ID NO: 2359 - protein, 9 aa, Artificial sequence
  synthetic sequence
SGSVSTTHY

SEQ ID NO: 2360 - protein, 9 aa, Artificial sequence
  synthetic sequence
SSNIGAAYP

SEQ ID NO: 2361 - protein, 9 aa, Artificial sequence
  synthetic sequence
RNDVCGYNY

SEQ ID NO: 2362 - protein, 12 aa, Artificial sequence
  synthetic sequence
QSILSSSYNKNY

SEQ ID NO: 2363 - protein, 11 aa, Artificial sequence
  synthetic sequence
QSLLHSNGYTY

SEQ ID NO: 2364 - protein, 9 aa, Artificial sequence
  synthetic sequence
SSDVGGYDY

SEQ ID NO: 2365 - protein, 7 aa, Artificial sequence
  synthetic sequence
ESVSTSY

SEQ ID NO: 2366 - protein, 6 aa, Artificial sequence
  synthetic sequence
HSLGSV

SEQ ID NO: 2367 - protein, 6 aa, Artificial sequence
  synthetic sequence
QSVATY

SEQ ID NO: 2368 - protein, 8 aa, Artificial sequence
  synthetic sequence
GGSLASNY

SEQ ID NO: 2369 - protein, 6 aa, Artificial sequence
  synthetic sequence
QRISRY

SEQ ID NO: 2370 - protein, 8 aa, Artificial sequence
  synthetic sequence
SNNVGSYA

SEQ ID NO: 2371 - protein, 11 aa, Artificial sequence
  synthetic sequence
QSLLHSDGRTY

SEQ ID NO: 2372 - protein, 9 aa, Artificial sequence
  synthetic sequence
SGSVSTSYY

SEQ ID NO: 2373 - protein, 6 aa, Artificial sequence
  synthetic sequence
LGISNY

SEQ ID NO: 2374 - protein, 6 aa, Artificial sequence
  synthetic sequence
QDIRGW

SEQ ID NO: 2375 - protein, 9 aa, Artificial sequence
  synthetic sequence
RSDVGGYNY

SEQ ID NO: 2376 - protein, 6 aa, Artificial sequence
  synthetic sequence
QSIKSY

SEQ ID NO: 2377 - protein, 7 aa, Artificial sequence
  synthetic sequence
QSISSNF

SEQ ID NO: 2378 - protein, 6 aa, Artificial sequence
  synthetic sequence
QVINSY

SEQ ID NO: 2379 - protein, 12 aa, Artificial sequence
  synthetic sequence
QSVLNRSNNKNY

SEQ ID NO: 2380 - protein, 6 aa, Artificial sequence
  synthetic sequence
QDISHY

SEQ ID NO: 2381 - protein, 8 aa, Artificial sequence
  synthetic sequence
SFNIGNNY

SEQ ID NO: 2382 - protein, 9 aa, Artificial sequence
  synthetic sequence
SSDVGGFNY

SEQ ID NO: 2383 - protein, 7 aa, Artificial sequence
  synthetic sequence
QSVTSHY

SEQ ID NO: 2384 - protein, 6 aa, Artificial sequence
  synthetic sequence
QSVSNY

SEQ ID NO: 2385 - protein, 6 aa, Artificial sequence
  synthetic sequence
QSISSF

SEQ ID NO: 2386 - protein, 6 aa, Artificial sequence
  synthetic sequence
QGTRNY

SEQ ID NO: 2387 - protein, 7 aa, Artificial sequence
  synthetic sequence
QSISSSF

SEQ ID NO: 2388 - protein, 7 aa, Artificial sequence
  synthetic sequence
QSVHSNY

SEQ ID NO: 2389 - protein, 12 aa, Artificial sequence
  synthetic sequence
QSVFYSPNNQNY

SEQ ID NO: 2390 - protein, 6 aa, Artificial sequence
  synthetic sequence
QGISYY

SEQ ID NO: 2391 - protein, 6 aa, Artificial sequence
  synthetic sequence
QKVGSN

SEQ ID NO: 2392 - protein, 6 aa, Artificial sequence
  synthetic sequence
QSISYY

SEQ ID NO: 2393 - protein, 8 aa, Artificial sequence
  synthetic sequence
NSNVAGIY

SEQ ID NO: 2394 - protein, 8 aa, Artificial sequence
  synthetic sequence
SSNVGSHT

SEQ ID NO: 2395 - protein, 9 aa, Artificial sequence
  synthetic sequence
SSDVGSYNF

SEQ ID NO: 2396 - protein, 12 aa, Artificial sequence
  synthetic sequence
QSVLYSPNNRNH

SEQ ID NO: 2397 - protein, 6 aa, Artificial sequence
  synthetic sequence
QAISRA

SEQ ID NO: 2398 - protein, 8 aa, Artificial sequence
  synthetic sequence
RSNIGTNT

SEQ ID NO: 2399 - protein, 8 aa, Artificial sequence
  synthetic sequence
RSNIGRTY

SEQ ID NO: 2400 - protein, 6 aa, Artificial sequence
  synthetic sequence
QSVDSY

SEQ ID NO: 2401 - protein, 9 aa, Artificial sequence
  synthetic sequence
SSAIGDYNY

SEQ ID NO: 2402 - protein, 7 aa, Artificial sequence
  synthetic sequence
QSVSSSH

SEQ ID NO: 2403 - protein, 7 aa, Artificial sequence
  synthetic sequence
QRVTNTY

SEQ ID NO: 2404 - protein, 6 aa, Artificial sequence
  synthetic sequence
QSISSN

SEQ ID NO: 2405 - protein, 8 aa, Artificial sequence
  synthetic sequence
SSNIGSNT

SEQ ID NO: 2406 - protein, 12 aa, Artificial sequence
  synthetic sequence
QSVLHRSNHNNY

SEQ ID NO: 2407 - protein, 12 aa, Artificial sequence
  synthetic sequence
QNVLYSSNNKNY

SEQ ID NO: 2408 - protein, 6 aa, Artificial sequence
  synthetic sequence
QSVRTN

SEQ ID NO: 2409 - protein, 8 aa, Artificial sequence
  synthetic sequence
RSNIGSND

SEQ ID NO: 2410 - protein, 7 aa, Artificial sequence
  synthetic sequence
QSLSGNH

SEQ ID NO: 2411 - protein, 6 aa, Artificial sequence
  synthetic sequence
QSMGSY

SEQ ID NO: 2412 - protein, 6 aa, Artificial sequence
  synthetic sequence
QRVRTN

SEQ ID NO: 2413 - protein, 9 aa, Artificial sequence
  synthetic sequence
SSHVGTYNL

SEQ ID NO: 2414 - protein, 6 aa, Artificial sequence
  synthetic sequence
QSISKY

SEQ ID NO: 2415 - protein, 6 aa, Artificial sequence
  synthetic sequence
QAINNN

SEQ ID NO: 2416 - protein, 6 aa, Artificial sequence
  synthetic sequence
SLRSSY

SEQ ID NO: 2417 - protein, 9 aa, Artificial sequence
  synthetic sequence
SGDVGGSNY

SEQ ID NO: 2418 - protein, 7 aa, Artificial sequence
  synthetic sequence
QTISNNF

SEQ ID NO: 2419 - protein, 6 aa, Artificial sequence
  synthetic sequence
QDIINN

SEQ ID NO: 2420 - protein, 9 aa, Artificial sequence
  synthetic sequence
NRDVGGYNY

SEQ ID NO: 2421 - protein, 6 aa, Artificial sequence
  synthetic sequence
QGISRH

SEQ ID NO: 2422 - protein, 11 aa, Artificial sequence
  synthetic sequence
QSLMQTNEYKY

SEQ ID NO: 2423 - protein, 9 aa, Artificial sequence
  synthetic sequence
SSDVGAYNY

SEQ ID NO: 2424 - protein, 6 aa, Artificial sequence
  synthetic sequence
QSVRSY

SEQ ID NO: 2425 - protein, 8 aa, Artificial sequence
  synthetic sequence
PSNIGDNF

SEQ ID NO: 2426 - protein, 9 aa, Artificial sequence
  synthetic sequence
GSNIGAGFD

SEQ ID NO: 2427 - protein, 6 aa, Artificial sequence
  synthetic sequence
QSISSS

SEQ ID NO: 2428 - protein, 9 aa, Artificial sequence
  synthetic sequence
SSDVGDYNY

SEQ ID NO: 2429 - protein, 6 aa, Artificial sequence
  synthetic sequence
QAISKY

SEQ ID NO: 2430 - protein, 8 aa, Artificial sequence
  synthetic sequence
SADIGSHY

SEQ ID NO: 2431 - protein, 9 aa, Artificial sequence
  synthetic sequence
TSDVGGYKY

SEQ ID NO: 2432 - protein, 6 aa, Artificial sequence
  synthetic sequence
QSISFY

SEQ ID NO: 2433 - protein, 7 aa, Artificial sequence
  synthetic sequence
HSVTSNY

SEQ ID NO: 2434 - protein, 6 aa, Artificial sequence
  synthetic sequence
RLGDKF

SEQ ID NO: 2435 - protein, 9 aa, Artificial sequence
  synthetic sequence
SSDVGGYKY

SEQ ID NO: 2436 - protein, 6 aa, Artificial sequence
  synthetic sequence
QSLNNY

SEQ ID NO: 2437 - protein, 9 aa, Artificial sequence
  synthetic sequence
SSDVGRYNF

SEQ ID NO: 2438 - protein, 9 aa, Artificial sequence
  synthetic sequence
STDIGEYTF

SEQ ID NO: 2439 - protein, 6 aa, Artificial sequence
  synthetic sequence
ESVSRK

SEQ ID NO: 2440 - protein, 12 aa, Artificial sequence
  synthetic sequence
QSLLSSSNNKNY

SEQ ID NO: 2441 - protein, 6 aa, Artificial sequence
  synthetic sequence
GLPKQY

SEQ ID NO: 2442 - protein, 6 aa, Artificial sequence
  synthetic sequence
ERINNY

SEQ ID NO: 2443 - protein, 8 aa, Artificial sequence
  synthetic sequence
SSNIGNNF

SEQ ID NO: 2444 - protein, 9 aa, Artificial sequence
  synthetic sequence
SSDVGDNNY

SEQ ID NO: 2445 - protein, 7 aa, Artificial sequence
  synthetic sequence
QSINSRY

SEQ ID NO: 2446 - protein, 7 aa, Artificial sequence
  synthetic sequence
QSVYTNY

SEQ ID NO: 2447 - protein, 6 aa, Artificial sequence
  synthetic sequence
QDISSY

SEQ ID NO: 2448 - protein, 9 aa, Artificial sequence
  synthetic sequence
SSDVDDYNY

SEQ ID NO: 2449 - protein, 7 aa, Artificial sequence
  synthetic sequence
QSVASNY

SEQ ID NO: 2450 - protein, 9 aa, Artificial sequence
  synthetic sequence
TGAVTSGHY

SEQ ID NO: 2451 - protein, 6 aa, Artificial sequence
  synthetic sequence
QCINTF

SEQ ID NO: 2452 - protein, 12 aa, Artificial sequence
  synthetic sequence
QNILHSSNNKNY

SEQ ID NO: 2453 - protein, 9 aa, Artificial sequence
  synthetic sequence
SSDVGSHDL

SEQ ID NO: 2454 - protein, 9 aa, Artificial sequence
  synthetic sequence
SSDVGVYNF

SEQ ID NO: 2455 - protein, 7 aa, Artificial sequence
  synthetic sequence
QSVRSRY

SEQ ID NO: 2456 - protein, 9 aa, Artificial sequence
  synthetic sequence
SRDVGDYNY

SEQ ID NO: 2457 - protein, 6 aa, Artificial sequence
  synthetic sequence
QSVRSN

SEQ ID NO: 2458 - protein, 9 aa, Artificial sequence
  synthetic sequence
SDIDVSAYN

SEQ ID NO: 2459 - protein, 6 aa, Artificial sequence
  synthetic sequence
QNIDIY

SEQ ID NO: 2460 - protein, 6 aa, Artificial sequence
  synthetic sequence
QAISSY

SEQ ID NO: 2461 - protein, 7 aa, Artificial sequence
  synthetic sequence
QTIDSRY

SEQ ID NO: 2462 - protein, 11 aa, Artificial sequence
  synthetic sequence
QSLLTSNGNNY

SEQ ID NO: 2463 - protein, 6 aa, Artificial sequence
  synthetic sequence
QSVGSD

SEQ ID NO: 2464 - protein, 6 aa, Artificial sequence
  synthetic sequence
NIGSKG

SEQ ID NO: 2465 - protein, 6 aa, Artificial sequence
  synthetic sequence
QPITTN

SEQ ID NO: 2466 - protein, 6 aa, Artificial sequence
  synthetic sequence
QDIEKY

SEQ ID NO: 2467 - protein, 7 aa, Artificial sequence
  synthetic sequence
QGISSNF

SEQ ID NO: 2468 - protein, 9 aa, Artificial sequence
  synthetic sequence
SSNIGASSD

SEQ ID NO: 2469 - protein, 6 aa, Artificial sequence
  synthetic sequence
QSVSRN

SEQ ID NO: 2470 - protein, 9 aa, Artificial sequence
  synthetic sequence
SSDIGAYNY

SEQ ID NO: 2471 - protein, 7 aa, Artificial sequence
  synthetic sequence
QSVDSRY

SEQ ID NO: 2472 - protein, 6 aa, Artificial sequence
  synthetic sequence
QSISNF

SEQ ID NO: 2473 - protein, 6 aa, Artificial sequence
  synthetic sequence
QGISGW

SEQ ID NO: 2474 - protein, 8 aa, Artificial sequence
  synthetic sequence
SSNIGSTF

SEQ ID NO: 2475 - protein, 9 aa, Artificial sequence
  synthetic sequence
STNIGAGYD

SEQ ID NO: 2476 - protein, 7 aa, Artificial sequence
  synthetic sequence
SGHSRYT

SEQ ID NO: 2477 - protein, 6 aa, Artificial sequence
  synthetic sequence
QSISDW

SEQ ID NO: 2478 - protein, 7 aa, Artificial sequence
  synthetic sequence
SGHNSYA

SEQ ID NO: 2479 - protein, 6 aa, Artificial sequence
  synthetic sequence
QSVNNY

SEQ ID NO: 2480 - protein, 7 aa, Artificial sequence
  synthetic sequence
QSVGSNF

SEQ ID NO: 2481 - protein, 11 aa, Artificial sequence
  synthetic sequence
QSLLHRNGYNY

SEQ ID NO: 2482 - protein, 6 aa, Artificial sequence
  synthetic sequence
QRVSDY

SEQ ID NO: 2483 - protein, 8 aa, Artificial sequence
  synthetic sequence
SPNIGNNY

SEQ ID NO: 2484 - protein, 6 aa, Artificial sequence
  synthetic sequence
QTISVY

SEQ ID NO: 2485 - protein, 9 aa, Artificial sequence
  synthetic sequence
TSDVGTYNR

SEQ ID NO: 2486 - protein, 9 aa, Artificial sequence
  synthetic sequence
SSDVGNYDF

SEQ ID NO: 2487 - protein, 9 aa, Artificial sequence
  synthetic sequence
SSNIGANYD

SEQ ID NO: 2488 - protein, 6 aa, Artificial sequence
  synthetic sequence
QDIGVW

SEQ ID NO: 2489 - protein, 6 aa, Artificial sequence
  synthetic sequence
QTISSW

SEQ ID NO: 2490 - protein, 6 aa, Artificial sequence
  synthetic sequence
QNIGVW

SEQ ID NO: 2491 - protein, 6 aa, Artificial sequence
  synthetic sequence
QSVSGH

SEQ ID NO: 2492 - protein, 9 aa, Artificial sequence
  synthetic sequence
TGTVTIGHY

SEQ ID NO: 2493 - protein, 9 aa, Artificial sequence
  synthetic sequence
TGAVTTGHY

SEQ ID NO: 2494 - protein, 7 aa, Artificial sequence
  synthetic sequence
QSISNNY

SEQ ID NO: 2495 - protein, 9 aa, Artificial sequence
  synthetic sequence
DSDVAAYNH

SEQ ID NO: 2496 - protein, 7 aa, Artificial sequence
  synthetic sequence
QIVSFSF

SEQ ID NO: 2497 - protein, 6 aa, Artificial sequence
  synthetic sequence
KIGSKS

SEQ ID NO: 2498 - protein, 6 aa, Artificial sequence
  synthetic sequence
ALPKKS

SEQ ID NO: 2499 - protein, 6 aa, Artificial sequence
  synthetic sequence
NIVSKS

SEQ ID NO: 2500 - protein, 7 aa, Artificial sequence
  synthetic sequence
QSVDYNY

SEQ ID NO: 2501 - protein, 9 aa, Artificial sequence
  synthetic sequence
RSDIGGYNS

SEQ ID NO: 2502 - protein, 6 aa, Artificial sequence
  synthetic sequence
QNINTW

SEQ ID NO: 2503 - protein, 11 aa, Artificial sequence
  synthetic sequence
QSLVYSDGSTY

SEQ ID NO: 2504 - protein, 6 aa, Artificial sequence
  synthetic sequence
QSLGKY

SEQ ID NO: 2505 - protein, 6 aa, Artificial sequence
  synthetic sequence
QSVGSN

SEQ ID NO: 2506 - protein, 6 aa, Artificial sequence
  synthetic sequence
QGIRTW

SEQ ID NO: 2507 - protein, 7 aa, Artificial sequence
  synthetic sequence
QRVSSSY

SEQ ID NO: 2508 - protein, 7 aa, Artificial sequence
  synthetic sequence
QSVSNSY

SEQ ID NO: 2509 - protein, 6 aa, Artificial sequence
  synthetic sequence
QGIANF

SEQ ID NO: 2510 - protein, 7 aa, Artificial sequence
  synthetic sequence
QFVSSNY

SEQ ID NO: 2511 - protein, 12 aa, Artificial sequence
  synthetic sequence
QNILYNSNNKNY

SEQ ID NO: 2512 - protein, 6 aa, Artificial sequence
  synthetic sequence
QEISNY

SEQ ID NO: 2513 - protein, 6 aa, Artificial sequence
  synthetic sequence
KIGSKN

SEQ ID NO: 2514 - protein, 11 aa, Artificial sequence
  synthetic sequence
ESLLHDNGFNY

SEQ ID NO: 2515 - protein, 11 aa, Artificial sequence
  synthetic sequence
QSLVYSDGRTY

SEQ ID NO: 2516 - protein, 7 aa, Artificial sequence
  synthetic sequence
QSVISSY

SEQ ID NO: 2517 - protein, 12 aa, Artificial sequence
  synthetic sequence
QSVLFNSNNKHY

SEQ ID NO: 2518 - protein, 6 aa, Artificial sequence
  synthetic sequence
QSITTY

SEQ ID NO: 2519 - protein, 6 aa, Artificial sequence
  synthetic sequence
QGISSF

SEQ ID NO: 2520 - protein, 8 aa, Artificial sequence
  synthetic sequence
SSNITNNY

SEQ ID NO: 2521 - protein, 7 aa, Artificial sequence
  synthetic sequence
RSVSSTY

SEQ ID NO: 2522 - protein, 6 aa, Artificial sequence
  synthetic sequence
QGIGDW

SEQ ID NO: 2523 - protein, 6 aa, Artificial sequence
  synthetic sequence
QDIANY

SEQ ID NO: 2524 - protein, 6 aa, Artificial sequence
  synthetic sequence
ESVGTN

SEQ ID NO: 2525 - protein, 6 aa, Artificial sequence
  synthetic sequence
QSINNY

SEQ ID NO: 2526 - protein, 7 aa, Artificial sequence
  synthetic sequence
QSISSTN

SEQ ID NO: 2527 - protein, 6 aa, Artificial sequence
  synthetic sequence
QIISSW

SEQ ID NO: 2528 - protein, 12 aa, Artificial sequence
  synthetic sequence
QSVLYSSNNMNY

SEQ ID NO: 2529 - protein, 12 aa, Artificial sequence
  synthetic sequence
QSVLYSSDNKNY

SEQ ID NO: 2530 - protein, 6 aa, Artificial sequence
  synthetic sequence
QFVSRY

SEQ ID NO: 2531 - protein, 6 aa, Artificial sequence
  synthetic sequence
QSVSNN

SEQ ID NO: 2532 - protein, 6 aa, Artificial sequence
  synthetic sequence
QSFSSY

SEQ ID NO: 2533 - protein, 11 aa, Artificial sequence
  synthetic sequence
QSLLYSDGYNH

SEQ ID NO: 2534 - protein, 11 aa, Artificial sequence
  synthetic sequence
QGLVFSDGNTY

SEQ ID NO: 2535 - protein, 6 aa, Artificial sequence
  synthetic sequence
QDISSS

SEQ ID NO: 2536 - protein, 12 aa, Artificial sequence
  synthetic sequence
QSVLYSSNNQNY

SEQ ID NO: 2537 - protein, 6 aa, Artificial sequence
  synthetic sequence
NIGSRS

SEQ ID NO: 2538 - protein, 6 aa, Artificial sequence
  synthetic sequence
QSVSIY

SEQ ID NO: 2539 - protein, 9 aa, Artificial sequence
  synthetic sequence
SGDIGRYNY

SEQ ID NO: 2540 - protein, 6 aa, Artificial sequence
  synthetic sequence
QDINMW

SEQ ID NO: 2541 - protein, 6 aa, Artificial sequence
  synthetic sequence
QTVSSN

SEQ ID NO: 2542 - protein, 12 aa, Artificial sequence
  synthetic sequence
QNIFHSSNNKIY

SEQ ID NO: 2543 - protein, 7 aa, Artificial sequence
  synthetic sequence
QSVNSDY

SEQ ID NO: 2544 - protein, 8 aa, Artificial sequence
  synthetic sequence
SSNIARHY

SEQ ID NO: 2545 - protein, 12 aa, Artificial sequence
  synthetic sequence
QSVLYDPNKKNY

SEQ ID NO: 2546 - protein, 11 aa, Artificial sequence
  synthetic sequence
ESLVHSDGNTY

SEQ ID NO: 2547 - protein, 11 aa, Artificial sequence
  synthetic sequence
QSLLHFNGYSY

SEQ ID NO: 2548 - protein, 11 aa, Artificial sequence
  synthetic sequence
QSLLHSNAYNY

SEQ ID NO: 2549 - protein, 7 aa, Artificial sequence
  synthetic sequence
QSLSSRY

SEQ ID NO: 2550 - protein, 6 aa, Artificial sequence
  synthetic sequence
QDVSSW

SEQ ID NO: 2551 - protein, 6 aa, Artificial sequence
  synthetic sequence
QDVTNY

SEQ ID NO: 2552 - protein, 12 aa, Artificial sequence
  synthetic sequence
QSVLYSSNNINY

SEQ ID NO: 2553 - protein, 6 aa, Artificial sequence
  synthetic sequence
RTINTY

SEQ ID NO: 2554 - protein, 6 aa, Artificial sequence
  synthetic sequence
QSVNSN

SEQ ID NO: 2555 - protein, 6 aa, Artificial sequence
  synthetic sequence
QSIDTY

SEQ ID NO: 2556 - protein, 6 aa, Artificial sequence
  synthetic sequence
QSVINS

SEQ ID NO: 2557 - protein, 8 aa, Artificial sequence
  synthetic sequence
SSNIARNY

SEQ ID NO: 2558 - protein, 6 aa, Artificial sequence
  synthetic sequence
RDIRND

SEQ ID NO: 2559 - protein, 6 aa, Artificial sequence
  synthetic sequence
QSITSN

SEQ ID NO: 2560 - protein, 12 aa, Artificial sequence
  synthetic sequence
QSVLYSPNSKNY

SEQ ID NO: 2561 - protein, 11 aa, Artificial sequence
  synthetic sequence
QSLLHSNGKTY

SEQ ID NO: 2562 - protein, 6 aa, Artificial sequence
  synthetic sequence
RGISSY

SEQ ID NO: 2563 - protein, 6 aa, Artificial sequence
  synthetic sequence
QSVNNN

SEQ ID NO: 2564 - protein, 6 aa, Artificial sequence
  synthetic sequence
RGISNY

SEQ ID NO: 2565 - protein, 6 aa, Artificial sequence
  synthetic sequence
QSISTF

SEQ ID NO: 2566 - protein, 7 aa, Artificial sequence
  synthetic sequence
QSINSDY

SEQ ID NO: 2567 - protein, 6 aa, Artificial sequence
  synthetic sequence
QSLSSF

SEQ ID NO: 2568 - protein, 6 aa, Artificial sequence
  synthetic sequence
QDVNSY

SEQ ID NO: 2569 - protein, 11 aa, Artificial sequence
  synthetic sequence
QSLEHNDGNTY

SEQ ID NO: 2570 - protein, 6 aa, Artificial sequence
  synthetic sequence
QSISTS

SEQ ID NO: 2571 - protein, 9 aa, Artificial sequence
  synthetic sequence
SSDVGGYPY

SEQ ID NO: 2572 - protein, 6 aa, Artificial sequence
  synthetic sequence
QSITNY

SEQ ID NO: 2573 - protein, 12 aa, Artificial sequence
  synthetic sequence
QSVLYSSNKQNY

SEQ ID NO: 2574 - protein, 6 aa, Artificial sequence
  synthetic sequence
QGIGSW

SEQ ID NO: 2575 - protein, 6 aa, Artificial sequence
  synthetic sequence
QSIDRW

SEQ ID NO: 2576 - protein, 6 aa, Artificial sequence
  synthetic sequence
ETISNY

SEQ ID NO: 2577 - protein, 6 aa, Artificial sequence
  synthetic sequence
QDISDF

SEQ ID NO: 2578 - protein, 6 aa, Artificial sequence
  synthetic sequence
QSFSNN

SEQ ID NO: 2579 - protein, 11 aa, Artificial sequence
  synthetic sequence
QSLLYSNGYNY

SEQ ID NO: 2580 - protein, 6 aa, Artificial sequence
  synthetic sequence
QSVYSN

SEQ ID NO: 2581 - protein, 6 aa, Artificial sequence
  synthetic sequence
ILRSYY

SEQ ID NO: 2582 - protein, 6 aa, Artificial sequence
  synthetic sequence
QSISSC

SEQ ID NO: 2583 - protein, 11 aa, Artificial sequence
  synthetic sequence
QSLVHSDGKTY

SEQ ID NO: 2584 - protein, 11 aa, Artificial sequence
  synthetic sequence
QSLLHSDGYTY

SEQ ID NO: 2585 - protein, 8 aa, Artificial sequence
  synthetic sequence
SSNIGITT

SEQ ID NO: 2586 - protein, 6 aa, Artificial sequence
  synthetic sequence
QDIGNY

SEQ ID NO: 2587 - protein, 6 aa, Artificial sequence
  synthetic sequence
QGITNW

SEQ ID NO: 2588 - protein, 7 aa, Artificial sequence
  synthetic sequence
QSIGRKY

SEQ ID NO: 2589 - protein, 6 aa, Artificial sequence
  synthetic sequence
QGISNW

SEQ ID NO: 2590 - protein, 6 aa, Artificial sequence
  synthetic sequence
HGIRND

SEQ ID NO: 2591 - protein, 12 aa, Artificial sequence
  synthetic sequence
QSLLSRSNNKYF

SEQ ID NO: 2592 - protein, 12 aa, Artificial sequence
  synthetic sequence
QSILYRSNNKNY

SEQ ID NO: 2593 - protein, 6 aa, Artificial sequence
  synthetic sequence
QDINKY

SEQ ID NO: 2594 - protein, 6 aa, Artificial sequence
  synthetic sequence
QSIGTH

SEQ ID NO: 2595 - protein, 12 aa, Artificial sequence
  synthetic sequence
QSVLYSSNNENY

SEQ ID NO: 2596 - protein, 11 aa, Artificial sequence
  synthetic sequence
QSLVHSDGDTS

SEQ ID NO: 2597 - protein, 7 aa, Artificial sequence
  synthetic sequence
QSVRGSY

SEQ ID NO: 2598 - protein, 6 aa, Artificial sequence
  synthetic sequence
QGISDY

SEQ ID NO: 2599 - protein, 6 aa, Artificial sequence
  synthetic sequence
QYFSTS

SEQ ID NO: 2600 - protein, 7 aa, Artificial sequence
  synthetic sequence
QSVSSRY

SEQ ID NO: 2601 - protein, 9 aa, Artificial sequence
  synthetic sequence
SSDVGNYDS

SEQ ID NO: 2602 - protein, 11 aa, Artificial sequence
  synthetic sequence
QSLLHSDGKTY

SEQ ID NO: 2603 - protein, 11 aa, Artificial sequence
  synthetic sequence
QSLEHSDGNTY

SEQ ID NO: 2604 - protein, 6 aa, Artificial sequence
  synthetic sequence
QGIRSW

SEQ ID NO: 2605 - protein, 6 aa, Artificial sequence
  synthetic sequence
QVISTW

SEQ ID NO: 2606 - protein, 7 aa, Artificial sequence
  synthetic sequence
QSVSGSY

SEQ ID NO: 2607 - protein, 6 aa, Artificial sequence
  synthetic sequence
QDISKY

SEQ ID NO: 2608 - protein, 7 aa, Artificial sequence
  synthetic sequence
QSLRSSY

SEQ ID NO: 2609 - protein, 6 aa, Artificial sequence
  synthetic sequence
EIISSY

SEQ ID NO: 2610 - protein, 6 aa, Artificial sequence
  synthetic sequence
QSIRTY

SEQ ID NO: 2611 - protein, 6 aa, Artificial sequence
  synthetic sequence
QIIGSW

SEQ ID NO: 2612 - protein, 6 aa, Artificial sequence
  synthetic sequence
QSIGGY

SEQ ID NO: 2613 - protein, 6 aa, Artificial sequence
  synthetic sequence
EDIRNH

SEQ ID NO: 2614 - protein, 6 aa, Artificial sequence
  synthetic sequence
QSVNSY

SEQ ID NO: 2615 - protein, 6 aa, Artificial sequence
  synthetic sequence
QGVSSN

SEQ ID NO: 2616 - protein, 11 aa, Artificial sequence
  synthetic sequence
QSLLHSNGYTH

SEQ ID NO: 2617 - protein, 6 aa, Artificial sequence
  synthetic sequence
QYFTTS

SEQ ID NO: 2618 - protein, 9 aa, Artificial sequence
  synthetic sequence
TGPVTSASS

SEQ ID NO: 2619 - protein, 6 aa, Artificial sequence
  synthetic sequence
QSISSQ

SEQ ID NO: 2620 - protein, 6 aa, Artificial sequence
  synthetic sequence
HDVRND

SEQ ID NO: 2621 - protein, 11 aa, Artificial sequence
  synthetic sequence
QSLVYSDGNTF

SEQ ID NO: 2622 - protein, 12 aa, Artificial sequence
  synthetic sequence
QSVLFSPKNKNY

SEQ ID NO: 2623 - protein, 6 aa, Artificial sequence
  synthetic sequence
QSVSST

SEQ ID NO: 2624 - protein, 8 aa, Artificial sequence
  synthetic sequence
WSNITNIN

SEQ ID NO: 2625 - protein, 11 aa, Artificial sequence
  synthetic sequence
QSLVYSDGDTY

SEQ ID NO: 2626 - protein, 6 aa, Artificial sequence
  synthetic sequence
QSIARN

SEQ ID NO: 2627 - protein, 6 aa, Artificial sequence
  synthetic sequence
QSVRFN

SEQ ID NO: 2628 - protein, 6 aa, Artificial sequence
  synthetic sequence
QSINSN

SEQ ID NO: 2629 - protein, 6 aa, Artificial sequence
  synthetic sequence
QGISNS

SEQ ID NO: 2630 - protein, 6 aa, Artificial sequence
  synthetic sequence
QTISSF

SEQ ID NO: 2631 - protein, 7 aa, Artificial sequence
  synthetic sequence
QSVYGNY

SEQ ID NO: 2632 - protein, 6 aa, Artificial sequence
  synthetic sequence
QSITRF

SEQ ID NO: 2633 - protein, 9 aa, Artificial sequence
  synthetic sequence
SSDVGSYEN

SEQ ID NO: 2634 - protein, 11 aa, Artificial sequence
  synthetic sequence
QSLVHIDGNTY

SEQ ID NO: 2635 - protein, 6 aa, Artificial sequence
  synthetic sequence
QSLSSY

SEQ ID NO: 2636 - protein, 7 aa, Artificial sequence
  synthetic sequence
QRIGSSY

SEQ ID NO: 2637 - protein, 6 aa, Artificial sequence
  synthetic sequence
ESIGRW

SEQ ID NO: 2638 - protein, 6 aa, Artificial sequence
  synthetic sequence
QTINNY

SEQ ID NO: 2639 - protein, 6 aa, Artificial sequence
  synthetic sequence
QDISSW

SEQ ID NO: 2640 - protein, 12 aa, Artificial sequence
  synthetic sequence
QSVLYSSNSKNY

SEQ ID NO: 2641 - protein, 11 aa, Artificial sequence
  synthetic sequence
QSLLHKNGYNY

SEQ ID NO: 2642 - protein, 6 aa, Artificial sequence
  synthetic sequence
QGITNS

SEQ ID NO: 2643 - protein, 6 aa, Artificial sequence
  synthetic sequence
ESVSSY

SEQ ID NO: 2644 - protein, 12 aa, Artificial sequence
  synthetic sequence
QSLLYRSNNKNY

SEQ ID NO: 2645 - protein, 6 aa, Artificial sequence
  synthetic sequence
QSVSSF

SEQ ID NO: 2646 - protein, 7 aa, Artificial sequence
  synthetic sequence
QSVTSNF

SEQ ID NO: 2647 - protein, 7 aa, Artificial sequence
  synthetic sequence
VNSDGSH

SEQ ID NO: 2648 - protein, 7 aa, Artificial sequence
  synthetic sequence
YKSDSDN

SEQ ID NO: 2649 - protein, 7 aa, Artificial sequence
  synthetic sequence
YDSDSNK

SEQ ID NO: 2650 - protein, 7 aa, Artificial sequence
  synthetic sequence
LYSDGSH

SEQ ID NO: 2651 - protein, 7 aa, Artificial sequence
  synthetic sequence
LNSDGSH

SEQ ID NO: 2652 - protein, 12 aa, Artificial sequence [sequence omitted]

SEQ ID NO: 2653 - protein, 12 aa, Artificial sequence [sequence omitted]

SEQ ID NO: 2654 - protein, 13 aa, Artificial sequence [sequence omitted]

SEQ ID NO: 2655 - protein, 11 aa, Artificial sequence [sequence omitted]

SEQ ID NO: 2656 - protein, 13 aa, Artificial sequence
  synthetic sequence
CASRDISGDHWVF

SEQ ID NO: 2657 - protein, 13 aa, Artificial sequence
  synthetic sequence
CTSYAGSNNAVVF

SEQ ID NO: 2658 - protein, 12 aa, Artificial sequence [sequence omitted]

SEQ ID NO: 2659 - protein, 12 aa, Artificial sequence
  synthetic sequence
CCSYATSSSVVF

SEQ ID NO: 2660 - protein, 13 aa, Artificial sequence [sequence omitted]

SEQ ID NO: 2661 - protein, 13 aa, Artificial sequence
  synthetic sequence
CSSYPGSNNTVLF

SEQ ID NO: 2662 - protein, 11 aa, Artificial sequence [sequence omitted]

SEQ ID NO: 2663 - protein, 11 aa, Artificial sequence [sequence omitted]

SEQ ID NO: 2664 - protein, 13 aa, Artificial sequence [sequence omitted]

SEQ ID NO: 2665 - protein, 10 aa, Artificial sequence
  synthetic sequence
CMQGTQPWTF

SEQ ID NO: 2666 - protein, 13 aa, Artificial sequence
  synthetic sequence
CQQHSRSPRGYTF

SEQ ID NO: 2667 - protein, 11 aa, Artificial sequence [sequence omitted]

SEQ ID NO: 2668 - protein, 12 aa, Artificial sequence
  synthetic sequence
CQQTFTTPMSSF

SEQ ID NO: 2669 - protein, 11 aa, Artificial sequence [sequence omitted]

SEQ ID NO: 2670 - protein, 12 aa, Artificial sequence [sequence omitted]

SEQ ID NO: 2671 - protein, 11 aa, Artificial sequence [sequence omitted]

SEQ ID NO: 2672 - protein, 11 aa, Artificial sequence [sequence omitted]

SEQ ID NO: 2673 - protein, 11 aa, Artificial sequence
  synthetic sequence
CQQYDNVILTF

SEQ ID NO: 2674 - protein, 11 aa, Artificial sequence [sequence omitted]

SEQ ID NO: 2675 - protein, 11 aa, Artificial sequence [sequence omitted]

SEQ ID NO: 2676 - protein, 11 aa, Artificial sequence [sequence omitted]

SEQ ID NO: 2677 - protein, 11 aa, Artificial sequence [sequence omitted]

SEQ ID NO: 2678 - protein, 11 aa, Artificial sequence [sequence omitted]

SEQ ID NO: 2679 - protein, 11 aa, Artificial sequence
  synthetic sequence
CQQYNIYTWTF

SEQ ID NO: 2680 - protein, 11 aa, Artificial sequence [sequence omitted]

SEQ ID NO: 2681 - protein, 13 aa, Artificial sequence
  synthetic sequence
CQHYENLPPSCAF

SEQ ID NO: 2682 - protein, 12 aa, Artificial sequence
  synthetic sequence
CLEYNTYSPWAF

SEQ ID NO: 2683 - protein, 12 aa, Artificial sequence [sequence omitted]

SEQ ID NO: 2684 - protein, 11 aa, Artificial sequence [sequence omitted]

SEQ ID NO: 2685 - protein, 12 aa, Artificial sequence [sequence omitted]

SEQ ID NO: 2686 - protein, 12 aa, Artificial sequence
  synthetic sequence
CSSYSTTGLSVF

SEQ ID NO: 2687 - protein, 11 aa, Artificial sequence
  synthetic sequence
CQHSYNFPPTF

SEQ ID NO: 2688 - protein, 11 aa, Artificial sequence
  synthetic sequence
CQRYDSYPWTF

SEQ ID NO: 2689 - protein, 11 aa, Artificial sequence [sequence omitted]

SEQ ID NO: 2690 - protein, 13 aa, Artificial sequence
  synthetic sequence
CATWDDSQGGFVF

SEQ ID NO: 2691 - protein, 11 aa, Artificial sequence [sequence omitted]

SEQ ID NO: 2692 - protein, 11 aa, Artificial sequence [sequence omitted]

SEQ ID NO: 2693 - protein, 11 aa, Artificial sequence [sequence omitted]

SEQ ID NO: 2694 - protein, 11 aa, Artificial sequence [sequence omitted]

SEQ ID NO: 2695 - protein, 10 aa, Artificial sequence [sequence omitted]

SEQ ID NO: 2696 - protein, 11 aa, Artificial sequence [sequence omitted]

SEQ ID NO: 2697 - protein, 14 aa, Artificial sequence
  synthetic sequence
CGTWDSRLSAPWVF

SEQ ID NO: 2698 - protein, 13 aa, Artificial sequence
  synthetic sequence
CATWDDRLRAWIF

SEQ ID NO: 2699 - protein, 11 aa, Artificial sequence [sequence omitted]

SEQ ID NO: 2700 - protein, 12 aa, Artificial sequence [sequence omitted]

SEQ ID NO: 2701 - protein, 11 aa, Artificial sequence [sequence omitted]

SEQ ID NO: 2702 - protein, 13 aa, Artificial sequence
  synthetic sequence
CLTWDDSLNGWLF

SEQ ID NO: 2703 - protein, 11 aa, Artificial sequence [sequence omitted]

SEQ ID NO: 2704 - protein, 11 aa, Artificial sequence [sequence omitted]

SEQ ID NO: 2705 - protein, 12 aa, Artificial sequence [sequence omitted]

SEQ ID NO: 2706 - protein, 11 aa, Artificial sequence [sequence omitted]

SEQ ID NO: 2707 - protein, 15 aa, Artificial sequence
  synthetic sequence
CQVWDSSGDHSYLVF

SEQ ID NO: 2708 - protein, 11 aa, Artificial sequence [sequence omitted]

SEQ ID NO: 2709 - protein, 11 aa, Artificial sequence [sequence omitted]

SEQ ID NO: 2710 - protein, 13 aa, Artificial sequence
  synthetic sequence
CNSRDSRGNNVIF

SEQ ID NO: 2711 - protein, 11 aa, Artificial sequence [sequence omitted]

SEQ ID NO: 2712 - protein, 11 aa, Artificial sequence [sequence omitted]

SEQ ID NO: 2713 - protein, 13 aa, Artificial sequence
  synthetic sequence
CQQYNSYSLPWTF

SEQ ID NO: 2714 - protein, 12 aa, Artificial sequence [sequence omitted]

SEQ ID NO: 2715 - protein, 11 aa, Artificial sequence [sequence omitted]

SEQ ID NO: 2716 - protein, 13 aa, Artificial sequence [sequence omitted]

SEQ ID NO: 2717 - protein, 12 aa, Artificial sequence
  synthetic sequence
CCSYADSYTLVF

SEQ ID NO: 2718 - protein, 11 aa, Artificial sequence [sequence omitted]

SEQ ID NO: 2719 - protein, 13 aa, Artificial sequence
  synthetic sequence
CAAWDDTLSRYVF

SEQ ID NO: 2720 - protein, 11 aa, Artificial sequence
  synthetic sequence
CMQSLRTPLVF

SEQ ID NO: 2721 - protein, 11 aa, Artificial sequence
  synthetic sequence
CEQTYNMPRTF

SEQ ID NO: 2722 - protein, 11 aa, Artificial sequence
  synthetic sequence
CQQYVTSVSTF

SEQ ID NO: 2723 - protein, 14 aa, Artificial sequence
  synthetic sequence
CAAWDDSLSGFVIF

SEQ ID NO: 2724 - protein, 11 aa, Artificial sequence [sequence omitted]

SEQ ID NO: 2725 - protein, 12 aa, Artificial sequence [sequence omitted]

SEQ ID NO: 2726 - protein, 11 aa, Artificial sequence [sequence omitted]

SEQ ID NO: 2727 - protein, 10 aa, Artificial sequence [sequence omitted]

SEQ ID NO: 2728 - protein, 12 aa, Artificial sequence [sequence omitted]

SEQ ID NO: 2729 - protein, 11 aa, Artificial sequence [sequence omitted]

SEQ ID NO: 2730 - protein, 11 aa, Artificial sequence
  synthetic sequence
CHQYVTSVYTF

SEQ ID NO: 2731 - protein, 11 aa, Artificial sequence [sequence omitted]

SEQ ID NO: 2732 - protein, 11 aa, Artificial sequence [sequence omitted]

SEQ ID NO: 2733 - protein, 11 aa, Artificial sequence [sequence omitted]

SEQ ID NO: 2734 - protein, 13 aa, Artificial sequence [sequence omitted]

SEQ ID NO: 2735 - protein, 13 aa, Artificial sequence
  synthetic sequence
CSSYTSSTTDYVF

SEQ ID NO: 2736 - protein, 10 aa, Artificial sequence
  synthetic sequence
CQQSRSLITF

SEQ ID NO: 2737 - protein, 11 aa, Artificial sequence [sequence omitted]

SEQ ID NO: 2738 - protein, 9 aa, Artificial sequence [sequence omitted]

SEQ ID NO: 2739 - protein, 11 aa, Artificial sequence
  synthetic sequence
CQQLNSYPHPF

SEQ ID NO: 2740 - protein, 12 aa, Artificial sequence
  synthetic sequence
CQQYNHWPFFTF

SEQ ID NO: 2741 - protein, 13 aa, Artificial sequence
  synthetic sequence
CQHHNNWPPTFTF

SEQ ID NO: 2742 - protein, 12 aa, Artificial sequence
  synthetic sequence
CQQTYTAPLTTF

SEQ ID NO: 2743 - protein, 13 aa, Artificial sequence [sequence omitted]

SEQ ID NO: 2744 - protein, 11 aa, Artificial sequence [sequence omitted]

SEQ ID NO: 2745 - protein, 11 aa, Artificial sequence [sequence omitted]

SEQ ID NO: 2746 - protein, 11 aa, Artificial sequence [sequence omitted]

SEQ ID NO: 2747 - protein, 11 aa, Artificial sequence [sequence omitted]

SEQ ID NO: 2748 - protein, 11 aa, Artificial sequence
  synthetic sequence
GQRTYNAPPSF

SEQ ID NO: 2749 - protein, 11 aa, Artificial sequence [sequence omitted]

SEQ ID NO: 2750 - protein, 11 aa, Artificial sequence
  synthetic sequence
CQQSYTPLFTF

SEQ ID NO: 2751 - protein, 13 aa, Artificial sequence [sequence omitted]

SEQ ID NO: 2752 - protein, 12 aa, Artificial sequence
  synthetic sequence
CHQYNNWLSLTF

SEQ ID NO: 2753 - protein, 13 aa, Artificial sequence [sequence omitted]

SEQ ID NO: 2754 - protein, 11 aa, Artificial sequence [sequence omitted]

SEQ ID NO: 2755 - protein, 10 aa, Artificial sequence [sequence omitted]

SEQ ID NO: 2756 - protein, 11 aa, Artificial sequence [sequence omitted]

SEQ ID NO: 2757 - protein, 11 aa, Artificial sequence [sequence omitted]

SEQ ID NO: 2758 - protein, 11 aa, Artificial sequence [sequence omitted]

SEQ ID NO: 2759 - protein, 12 aa, Artificial sequence
  synthetic sequence
CQQRINWPPYTF

SEQ ID NO: 2760 - protein, 11 aa, Artificial sequence [sequence omitted]

SEQ ID NO: 2761 - protein, 10 aa, Artificial sequence
  synthetic sequence
CQQTHSFPTF

SEQ ID NO: 2762 - protein, 11 aa, Artificial sequence
  synthetic sequence
CLQRRNWPLTF

SEQ ID NO: 2763 - protein, 11 aa, Artificial sequence [sequence omitted]

SEQ ID NO: 2764 - protein, 13 aa, Artificial sequence
  synthetic sequence
CATWDDGRSAFVF

SEQ ID NO: 2765 - protein, 13 aa, Artificial sequence [sequence omitted]

SEQ ID NO: 2766 - protein, 20 aa, Artificial sequence
  synthetic sequence
SPSRPGRSRSRGSPFPQPSP

SEQ ID NO: 2767 - protein, 12 aa, Artificial sequence [sequence omitted]

SEQ ID NO: 2768 - protein, 11 aa, Artificial sequence [sequence omitted]

SEQ ID NO: 2769 - protein, 13 aa, Artificial sequence [sequence omitted]

SEQ ID NO: 2770 - protein, 11 aa, Artificial sequence
  synthetic sequence
CQQRDTWPPVF

SEQ ID NO: 2771 - protein, 11 aa, Artificial sequence [sequence omitted]

SEQ ID NO: 2772 - protein, 13 aa, Artificial sequence
  synthetic sequence
CSAWDDSLSAVLF

SEQ ID NO: 2773 - protein, 10 aa, Artificial sequence
  synthetic sequence
CQQYFTSPTF

SEQ ID NO: 2774 - protein, 11 aa, Artificial sequence
  synthetic sequence
CQQYGDLFRTF

SEQ ID NO: 2775 - protein, 11 aa, Artificial sequence
  synthetic sequence
CQQYIRSSWTF

SEQ ID NO: 2776 - protein, 11 aa, Artificial sequence [sequence omitted]

SEQ ID NO: 2777 - protein, 12 aa, Artificial sequence [sequence omitted]

SEQ ID NO: 2778 - protein, 11 aa, Artificial sequence [sequence omitted]

SEQ ID NO: 2779 - protein, 13 aa, Artificial sequence [sequence omitted]

SEQ ID NO: 2780 - protein, 12 aa, Artificial sequence [sequence omitted]

SEQ ID NO: 2781 - protein, 11 aa, Artificial sequence [sequence omitted]

SEQ ID NO: 2782 - protein, 11 aa, Artificial sequence [sequence omitted]

SEQ ID NO: 2783 - protein, 11 aa, Artificial sequence [sequence omitted]

SEQ ID NO: 2784 - protein, 11 aa, Artificial sequence [sequence omitted]

SEQ ID NO: 2785 - protein, 12 aa, Artificial sequence
  synthetic sequence
CSSYMTGSSYVF

SEQ ID NO: 2786 - protein, 12 aa, Artificial sequence
  synthetic sequence
CQSADSSGAGVF

SEQ ID NO: 2787 - protein, 11 aa, Artificial sequence [sequence omitted]

SEQ ID NO: 2788 - protein, 11 aa, Artificial sequence
  synthetic sequence
CQQNYRVPYTF

SEQ ID NO: 2789 - protein, 11 aa, Artificial sequence [sequence omitted]

SEQ ID NO: 2790 - protein, 11 aa, Artificial sequence [sequence omitted]

SEQ ID NO: 2791 - protein, 11 aa, Artificial sequence [sequence omitted]

SEQ ID NO: 2792 - protein, 10 aa, Artificial sequence [sequence omitted]

SEQ ID NO: 2793 - protein, 11 aa, Artificial sequence [sequence omitted]

SEQ ID NO: 2794 - protein, 11 aa, Artificial sequence
  synthetic sequence
CQQYHDLPITF

SEQ ID NO: 2795 - protein, 11 aa, Artificial sequence [sequence omitted]

SEQ ID NO: 2796 - protein, 13 aa, Artificial sequence [sequence omitted]

SEQ ID NO: 2797 - protein, 11 aa, Artificial sequence
  synthetic sequence
CQNYRSGAFTF

SEQ ID NO: 2798 - protein, 11 aa, Artificial sequence [sequence omitted]

SEQ ID NO: 2799 - protein, 12 aa, Artificial sequence [sequence omitted]

SEQ ID NO: 2800 - protein, 11 aa, Artificial sequence
  synthetic sequence
CQQYHTYSRTF

SEQ ID NO: 2801 - protein, 16 aa, Artificial sequence
  synthetic sequence
CFSTEDTGTDDVTWVF

SEQ ID NO: 2802 - protein, 13 aa, Artificial sequence
  synthetic sequence
CAVWDGSLSGVLF

SEQ ID NO: 2803 - protein, 11 aa, Artificial sequence [sequence omitted]

SEQ ID NO: 2804 - protein, 12 aa, Artificial sequence [sequence omitted]

SEQ ID NO: 2805 - protein, 11 aa, Artificial sequence [sequence omitted]

SEQ ID NO: 2806 - protein, 11 aa, Artificial sequence [sequence omitted]

SEQ ID NO: 2807 - protein, 11 aa, Artificial sequence [sequence omitted]

SEQ ID NO: 2808 - protein, 12 aa, Artificial sequence
  synthetic sequence
CLQHKDISGFTF

SEQ ID NO: 2809 - protein, 11 aa, Artificial sequence [sequence omitted]

SEQ ID NO: 2810 - protein, 11 aa, Artificial sequence [sequence omitted]

SEQ ID NO: 2811 - protein, 13 aa, Artificial sequence
  synthetic sequence
CGTWDDSLDGWVF

SEQ ID NO: 2812 - protein, 11 aa, Artificial sequence [sequence omitted]

SEQ ID NO: 2813 - protein, 11 aa, Artificial sequence
  synthetic sequence
CSSYARDKWVF

SEQ ID NO: 2814 - protein, 12 aa, Artificial sequence
  synthetic sequence
CYSTDSSDNFVF

SEQ ID NO: 2815 - protein, 10 aa, Artificial sequence [sequence omitted]

SEQ ID NO: 2816 - protein, 13 aa, Artificial sequence [sequence omitted]

SEQ ID NO: 2817 - protein, 11 aa, Artificial sequence [sequence omitted]

SEQ ID NO: 2818 - protein, 13 aa, Artificial sequence [sequence omitted]

SEQ ID NO: 2819 - protein, 11 aa, Artificial sequence [sequence omitted]

SEQ ID NO: 2820 - protein, 14 aa, Artificial sequence [sequence omitted]

SEQ ID NO: 2821 - protein, 11 aa, Artificial sequence
  synthetic sequence
CQQYNRSPQTF

SEQ ID NO: 2822 - protein, 11 aa, Artificial sequence [sequence omitted]

SEQ ID NO: 2823 - protein, 12 aa, Artificial sequence [sequence omitted]

SEQ ID NO: 2824 - protein, 12 aa, Artificial sequence
  synthetic sequence
CQSSDSSLSVVL

SEQ ID NO: 2825 - protein, 11 aa, Artificial sequence
  synthetic sequence
CQQSFNSLWTF

SEQ ID NO: 2826 - protein, 14 aa, Artificial sequence
  synthetic sequence
CAAWDDRLTGSWVF

SEQ ID NO: 2827 - protein, 11 aa, Artificial sequence
  synthetic sequence
CQQYHIFSPTF

SEQ ID NO: 2828 - protein, 11 aa, Artificial sequence
  synthetic sequence
CQQYKSYSYSF

SEQ ID NO: 2829 - protein, 13 aa, Artificial sequence
  synthetic sequence
CQQRSSWPPALSF

SEQ ID NO: 2830 - protein, 11 aa, Artificial sequence [sequence omitted]

SEQ ID NO: 2831 - protein, 12 aa, Artificial sequence
  synthetic sequence
CQVWDDVSGRVF

SEQ ID NO: 2832 - protein, 11 aa, Artificial sequence
  synthetic sequence
CMIWHGSAWVF

SEQ ID NO: 2833 - protein, 11 aa, Artificial sequence
  synthetic sequence
CQQSYSTPRTF

SEQ ID NO: 2834 - protein, 11 aa, Artificial sequence [sequence omitted]

SEQ ID NO: 2835 - protein, 11 aa, Artificial sequence
  synthetic sequence
CQQYTGTSRTF

SEQ ID NO: 2836 - protein, 13 aa, Artificial sequence
  synthetic sequence
CNSRDSRGNSVIF

SEQ ID NO: 2837 - protein, 11 aa, Artificial sequence
  synthetic sequence
CHQYENLPYTF

SEQ ID NO: 2838 - protein, 10 aa, Artificial sequence [sequence omitted]

SEQ ID NO: 2839 - protein, 10 aa, Artificial sequence [sequence omitted]

SEQ ID NO: 2840 - protein, 13 aa, Artificial sequence
  synthetic sequence
CSSYGGGNNLEVF

SEQ ID NO: 2841 - protein, 11 aa, Artificial sequence [sequence omitted]

SEQ ID NO: 2842 - protein, 12 aa, Artificial sequence [sequence omitted]

SEQ ID NO: 2843 - protein, 11 aa, Artificial sequence [sequence omitted]

SEQ ID NO: 2844 - protein, 11 aa, Artificial sequence
  synthetic sequence
CQHSHNFPPTF

SEQ ID NO: 2845 - protein, 12 aa, Artificial sequence [sequence omitted]

SEQ ID NO: 2846 - protein, 11 aa, Artificial sequence [sequence omitted]

SEQ ID NO: 2847 - protein, 11 aa, Artificial sequence [sequence omitted]

SEQ ID NO: 2848 - protein, 11 aa, Artificial sequence
  synthetic sequence
CLQAVSFPYTF

SEQ ID NO: 2849 - protein, 11 aa, Artificial sequence [sequence omitted]

SEQ ID NO: 2850 - protein, 12 aa, Artificial sequence [sequence omitted]

SEQ ID NO: 2851 - protein, 11 aa, Artificial sequence [sequence omitted]

SEQ ID NO: 2852 - protein, 11 aa, Artificial sequence [sequence omitted]

SEQ ID NO: 2853 - protein, 13 aa, Artificial sequence [sequence omitted]

SEQ ID NO: 2854 - protein, 11 aa, Artificial sequence
  synthetic sequence
CQQLNTYTLTF

SEQ ID NO: 2855 - protein, 12 aa, Artificial sequence [sequence omitted]

SEQ ID NO: 2856 - protein, 14 aa, Artificial sequence
  synthetic sequence
CQVWDISSDPLGIF

SEQ ID NO: 2857 - protein, 11 aa, Artificial sequence [sequence omitted]

SEQ ID NO: 2858 - protein, 11 aa, Artificial sequence
  synthetic sequence
CHQYYSSPQSF

SEQ ID NO: 2859 - protein, 11 aa, Artificial sequence
  synthetic sequence
CLQDINNPWTF

SEQ ID NO: 2860 - protein, 13 aa, Artificial sequence [sequence omitted]

SEQ ID NO: 2861 - protein, 15 aa, Artificial sequence
  synthetic sequence
CQSYDTSLSGPDVVF

SEQ ID NO: 2862 - protein, 11 aa, Artificial sequence [sequence omitted]

SEQ ID NO: 2863 - protein, 13 aa, Artificial sequence [sequence omitted]

SEQ ID NO: 2864 - protein, 12 aa, Artificial sequence [sequence omitted]

SEQ ID NO: 2865 - protein, 12 aa, Artificial sequence [sequence omitted]

SEQ ID NO: 2866 - protein, 11 aa, Artificial sequence
  synthetic sequence
CCSYAGGDVVF

SEQ ID NO: 2867 - protein, 13 aa, Artificial sequence [sequence omitted]

SEQ ID NO: 2868 - protein, 11 aa, Artificial sequence [sequence omitted]

SEQ ID NO: 2869 - protein, 11 aa, Artificial sequence [sequence omitted]

SEQ ID NO: 2870 - protein, 11 aa, Artificial sequence
  synthetic sequence
WQQSYITPRTF

SEQ ID NO: 2871 - protein, 13 aa, Artificial sequence [sequence omitted]

SEQ ID NO: 2872 - protein, 11 aa, Artificial sequence [sequence omitted]

SEQ ID NO: 2873 - protein, 13 aa, Artificial sequence
  synthetic sequence
CSSYSGSSTDVVF

SEQ ID NO: 2874 - protein, 12 aa, Artificial sequence
  synthetic sequence
CCSFTSSATWVF

SEQ ID NO: 2875 - protein, 11 aa, Artificial sequence
  synthetic sequence
CQQHYGNPRTF

SEQ ID NO: 2876 - protein, 11 aa, Artificial sequence [sequence omitted]

SEQ ID NO: 2877 - protein, 11 aa, Artificial sequence
  synthetic sequence
CQQCRDSVLTF

SEQ ID NO: 2878 - protein, 10 aa, Artificial sequence [sequence omitted]

SEQ ID NO: 2879 - protein, 13 aa, Artificial sequence
  synthetic sequence
CGAWDGSLSAGVF

SEQ ID NO: 2880 - protein, 11 aa, Artificial sequence [sequence omitted]

SEQ ID NO: 2881 - protein, 11 aa, Artificial sequence
  synthetic sequence
CYSGAGNTRMF

SEQ ID NO: 2882 - protein, 12 aa, Artificial sequence [sequence omitted]

SEQ ID NO: 2883 - protein, 15 aa, Artificial sequence
  synthetic sequence
CQSQDSTLSDVGVVF

SEQ ID NO: 2884 - protein, 10 aa, Artificial sequence
  synthetic sequence
CQQYYTTYSF

SEQ ID NO: 2885 - protein, 10 aa, Artificial sequence
  synthetic sequence
CQQYGSSFIF

SEQ ID NO: 2886 - protein, 12 aa, Artificial sequence
  synthetic sequence
CQQFYSYPLFTF

SEQ ID NO: 2887 - protein, 13 aa, Artificial sequence
  synthetic sequence
CQHRSNWPPMWTF

SEQ ID NO: 2888 - protein, 13 aa, Artificial sequence
  synthetic sequence
CCSYGDTYARNVF

SEQ ID NO: 2889 - protein, 11 aa, Artificial sequence [sequence omitted]

SEQ ID NO: 2890 - protein, 11 aa, Artificial sequence [sequence omitted]

SEQ ID NO: 2891 - protein, 13 aa, Artificial sequence [sequence omitted]

SEQ ID NO: 2892 - protein, 12 aa, Artificial sequence [sequence omitted]

SEQ ID NO: 2893 - protein, 13 aa, Artificial sequence
  synthetic sequence
CQSFDSSLSAEVF

SEQ ID NO: 2894 - protein, 12 aa, Artificial sequence
  synthetic sequence
CGSYADFKNVVF

SEQ ID NO: 2895 - protein, 12 aa, Artificial sequence
  synthetic sequence
FSSYTTSSTLVF

SEQ ID NO: 2896 - protein, 11 aa, Artificial sequence [sequence omitted]

SEQ ID NO: 2897 - protein, 11 aa, Artificial sequence [sequence omitted]

SEQ ID NO: 2898 - protein, 11 aa, Artificial sequence [sequence omitted]

SEQ ID NO: 2899 - protein, 11 aa, Artificial sequence [sequence omitted]

SEQ ID NO: 2900 - protein, 12 aa, Artificial sequence [sequence omitted]

SEQ ID NO: 2901 - protein, 11 aa, Artificial sequence
  synthetic sequence
CQQRSSWPPPF

SEQ ID NO: 2902 - protein, 11 aa, Artificial sequence [sequence omitted]

SEQ ID NO: 2903 - protein, 12 aa, Artificial sequence
  synthetic sequence
CQSYDTGNPWVF

SEQ ID NO: 2904 - protein, 11 aa, Artificial sequence [sequence omitted]

SEQ ID NO: 2905 - protein, 11 aa, Artificial sequence
  synthetic sequence
CQQSYGHPPTF

SEQ ID NO: 2906 - protein, 13 aa, Artificial sequence
  synthetic sequence
CSTWDYSLSALSS

SEQ ID NO: 2907 - protein, 11 aa, Artificial sequence
  synthetic sequence
CMHTIQLPYTF

SEQ ID NO: 2908 - protein, 12 aa, Artificial sequence [sequence omitted]

SEQ ID NO: 2909 - protein, 11 aa, Artificial sequence [sequence omitted]

SEQ ID NO: 2910 - protein, 11 aa, Artificial sequence [sequence omitted]

SEQ ID NO: 2911 - protein, 11 aa, Artificial sequence [sequence omitted]

SEQ ID NO: 2912 - protein, 10 aa, Artificial sequence [sequence omitted]

SEQ ID NO: 2913 - protein, 13 aa, Artificial sequence
  synthetic sequence
CSSYAGTNIHVLF

SEQ ID NO: 2914 - protein, 11 aa, Artificial sequence [sequence omitted]

SEQ ID NO: 2915 - protein, 11 aa, Artificial sequence [sequence omitted]

SEQ ID NO: 2916 - protein, 12 aa, Artificial sequence [sequence omitted]

SEQ ID NO: 2917 - protein, 11 aa, Artificial sequence [sequence omitted]

SEQ ID NO: 2918 - protein, 12 aa, Artificial sequence [sequence omitted]

SEQ ID NO: 2919 - protein, 13 aa, Artificial sequence [sequence omitted]

SEQ ID NO: 2920 - protein, 11 aa, Artificial sequence [sequence omitted]

SEQ ID NO: 2921 - protein, 11 aa, Artificial sequence [sequence omitted]

SEQ ID NO: 2922 - protein, 13 aa, Artificial sequence [sequence omitted]

SEQ ID NO: 2923 - protein, 12 aa, Artificial sequence
  synthetic sequence
CSSYTTSSAVLF

SEQ ID NO: 2924 - protein, 11 aa, Artificial sequence
  synthetic sequence
CQQCGSSFCTF

SEQ ID NO: 2925 - protein, 11 aa, Artificial sequence [sequence omitted]

SEQ ID NO: 2926 - protein, 11 aa, Artificial sequence
  synthetic sequence
CQQYNIHPWTF

SEQ ID NO: 2927 - protein, 12 aa, Artificial sequence
  synthetic sequence
CQQYFGLPPITF

SEQ ID NO: 2928 - protein, 11 aa, Artificial sequence [sequence omitted]

SEQ ID NO: 2929 - protein, 8 aa, Artificial sequence [sequence omitted]

SEQ ID NO: 2930 - protein, 11 aa, Artificial sequence [sequence omitted]

SEQ ID NO: 2931 - protein, 13 aa, Artificial sequence [sequence omitted]

SEQ ID NO: 2932 - protein, 10 aa, Artificial sequence
  synthetic sequence
CQQYGDSISF

SEQ ID NO: 2933 - protein, 11 aa, Artificial sequence [sequence omitted]

SEQ ID NO: 2934 - protein, 12 aa, Artificial sequence
  synthetic sequence
CQQRSEWPPLTF

SEQ ID NO: 2935 - protein, 13 aa, Artificial sequence
  synthetic sequence
CQQYSGWPPEGTF

SEQ ID NO: 2936 - protein, 11 aa, Artificial sequence [sequence omitted]

SEQ ID NO: 2937 - protein, 11 aa, Artificial sequence [sequence omitted]

SEQ ID NO: 2938 - protein, 13 aa, Artificial sequence
  synthetic sequence
CAAWDDNLSGQVF

SEQ ID NO: 2939 - protein, 11 aa, Artificial sequence
  synthetic sequence
CQQCYSSPRSF

SEQ ID NO: 2940 - protein, 13 aa, Artificial sequence [sequence omitted]

SEQ ID NO: 2941 - protein, 12 aa, Artificial sequence
  synthetic sequence
CCSYVGSSLYVF

SEQ ID NO: 2942 - protein, 13 aa, Artificial sequence
  synthetic sequence
CYSTDSSSNQRVF

SEQ ID NO: 2943 - protein, 10 aa, Artificial sequence
  synthetic sequence
CMQATQLRTF

SEQ ID NO: 2944 - protein, 11 aa, Artificial sequence
  synthetic sequence
CQHFDSYAQTF

SEQ ID NO: 2945 - protein, 14 aa, Artificial sequence
  synthetic sequence
CAAWDDNLNGLWAF

SEQ ID NO: 2946 - protein, 11 aa, Artificial sequence [sequence omitted]

SEQ ID NO: 2947 - protein, 14 aa, Artificial sequence
  synthetic sequence
CAAWEDTLSAHVVL

SEQ ID NO: 2948 - protein, 11 aa, Artificial sequence [sequence omitted]

SEQ ID NO: 2949 - protein, 14 aa, Artificial sequence
  synthetic sequence
CSSYSSSSTLVFVF

SEQ ID NO: 2950 - protein, 10 aa, Artificial sequence [sequence omitted]

SEQ ID NO: 2951 - protein, 12 aa, Artificial sequence [sequence omitted]

SEQ ID NO: 2952 - protein, 11 aa, Artificial sequence
  synthetic sequence
CQHSFTLPYTF

SEQ ID NO: 2953 - protein, 13 aa, Artificial sequence
  synthetic sequence
CQVWDSSSDHLWY

SEQ ID NO: 2954 - protein, 14 aa, Artificial sequence
  synthetic sequence
CAACDDSLSGPFGC

SEQ ID NO: 2955 - protein, 11 aa, Artificial sequence
  synthetic sequence
CQQYYSALITF

SEQ ID NO: 2956 - protein, 11 aa, Artificial sequence [sequence omitted]

SEQ ID NO: 2957 - protein, 12 aa, Artificial sequence
  synthetic sequence
CQQYYTAPPHTF

SEQ ID NO: 2958 - protein, 10 aa, Artificial sequence
  synthetic sequence
CQQYNKWSTF

SEQ ID NO: 2959 - protein, 14 aa, Artificial sequence
  synthetic sequence
CGAWDSSLNAGYVF

SEQ ID NO: 2960 - protein, 11 aa, Artificial sequence
  synthetic sequence
CQQYDFPPLTF

SEQ ID NO: 2961 - protein, 10 aa, Artificial sequence [sequence omitted]

SEQ ID NO: 2962 - protein, 11 aa, Artificial sequence [sequence omitted]

SEQ ID NO: 2963 - protein, 11 aa, Artificial sequence [sequence omitted]

SEQ ID NO: 2964 - protein, 11 aa, Artificial sequence
  synthetic sequence
CQQYGTSPWGF

SEQ ID NO: 2965 - protein, 11 aa, Artificial sequence [sequence omitted]

SEQ ID NO: 2966 - protein, 13 aa, Artificial sequence
  synthetic sequence
CCSYARSRSDVVF

SEQ ID NO: 2967 - protein, 11 aa, Artificial sequence [sequence omitted]

SEQ ID NO: 2968 - protein, 11 aa, Artificial sequence
  synthetic sequence
CQQYKSSPPTF

SEQ ID NO: 2969 - protein, 10 aa, Artificial sequence [sequence omitted]

SEQ ID NO: 2970 - protein, 12 aa, Artificial sequence [sequence omitted]

SEQ ID NO: 2971 - protein, 15 aa, Artificial sequence
  synthetic sequence
CNSRDSSGNHLGELF

SEQ ID NO: 2972 - protein, 11 aa, Artificial sequence [sequence omitted]

SEQ ID NO: 2973 - protein, 11 aa, Artificial sequence
  synthetic sequence
CLHNHNYPRTF

SEQ ID NO: 2974 - protein, 13 aa, Artificial sequence
  synthetic sequence
CGSFTSSGTLYVF

SEQ ID NO: 2975 - protein, 12 aa, Artificial sequence
  synthetic sequence
CQQLISYPPITF

SEQ ID NO: 2976 - protein, 13 aa, Artificial sequence [sequence omitted]

SEQ ID NO: 2977 - protein, 11 aa, Artificial sequence [sequence omitted]

SEQ ID NO: 2978 - protein, 12 aa, Artificial sequence [sequence omitted]

SEQ ID NO: 2979 - protein, 11 aa, Artificial sequence [sequence omitted]

SEQ ID NO: 2980 - protein, 12 aa, Artificial sequence [sequence omitted]

SEQ ID NO: 2981 - protein, 11 aa, Artificial sequence
  synthetic sequence
CQHRISWPLTF

SEQ ID NO: 2982 - protein, 12 aa, Artificial sequence [sequence omitted]

SEQ ID NO: 2983 - protein, 13 aa, Artificial sequence [sequence omitted]

SEQ ID NO: 2984 - protein, 14 aa, Artificial sequence
  synthetic sequence
CQSYDSSLSAYVIF

SEQ ID NO: 2985 - protein, 12 aa, Artificial sequence
  synthetic sequence
CLQATHFPHLTF

SEQ ID NO: 2986 - protein, 12 aa, Artificial sequence [sequence omitted]

SEQ ID NO: 2987 - protein, 11 aa, Artificial sequence [sequence omitted]

SEQ ID NO: 2988 - protein, 10 aa, Artificial sequence
  synthetic sequence
CQHYDILPFF

SEQ ID NO: 2989 - protein, 15 aa, Artificial sequence
  synthetic sequence
CAAWDDSVTSPNYVF

SEQ ID NO: 2990 - protein, 11 aa, Artificial sequence
  synthetic sequence
CSAYTVSGVVF

SEQ ID NO: 2991 - protein, 11 aa, Artificial sequence [sequence omitted]

SEQ ID NO: 2992 - protein, 11 aa, Artificial sequence [sequence omitted]

SEQ ID NO: 2993 - protein, 11 aa, Artificial sequence
  synthetic sequence
CQAWDSRIGVF

SEQ ID NO: 2994 - protein, 13 aa, Artificial sequence
  synthetic sequence
CSSFTSGSTLGVF

SEQ ID NO: 2995 - protein, 11 aa, Artificial sequence
  synthetic sequence
CQQTLTAPRTF

SEQ ID NO: 2996 - protein, 13 aa, Artificial sequence
  synthetic sequence
CAAWDDGLNGLPF

SEQ ID NO: 2997 - protein, 11 aa, Artificial sequence [sequence omitted]

SEQ ID NO: 2998 - protein, 15 aa, Artificial sequence [sequence omitted]

SEQ ID NO: 2999 - protein, 14 aa, Artificial sequence
  synthetic sequence
CSSYAGSNTFNYVF

SEQ ID NO: 3000 - protein, 12 aa, Artificial sequence [sequence omitted]

SEQ ID NO: 3001 - protein, 12 aa, Artificial sequence
  synthetic sequence
CNSYTSRRTVIF

SEQ ID NO: 3002 - protein, 12 aa, Artificial sequence [sequence omitted]

SEQ ID NO: 3003 - protein, 11 aa, Artificial sequence
  synthetic sequence
CEQYYSSPLTF

SEQ ID NO: 3004 - protein, 12 aa, Artificial sequence
  synthetic sequence
CQAIDSRDNWVF

SEQ ID NO: 3005 - protein, 12 aa, Artificial sequence [sequence omitted]

SEQ ID NO: 3006 - protein, 11 aa, Artificial sequence
  synthetic sequence
CYSYAGTFVVF

SEQ ID NO: 3007 - protein, 11 aa, Artificial sequence
  synthetic sequence
CQQYDSFSITF

SEQ ID NO: 3008 - protein, 13 aa, Artificial sequence [sequence omitted]

SEQ ID NO: 3009 - protein, 10 aa, Artificial sequence [sequence omitted]

SEQ ID NO: 3010 - protein, 12 aa, Artificial sequence [sequence omitted]

SEQ ID NO: 3011 - protein, 12 aa, Artificial sequence [sequence omitted]

SEQ ID NO: 3012 - protein, 14 aa, Artificial sequence
  synthetic sequence
CQSYDSSLSTYVIF

SEQ ID NO: 3013 - protein, 11 aa, Artificial sequence [sequence omitted]

SEQ ID NO: 3014 - protein, 14 aa, Artificial sequence
  synthetic sequence
CQSYDSRLSAYVIF

SEQ ID NO: 3015 - protein, 11 aa, Artificial sequence
  synthetic sequence
CCSYVGTFVVF

SEQ ID NO: 3016 - protein, 11 aa, Artificial sequence [sequence omitted]

SEQ ID NO: 3017 - protein, 11 aa, Artificial sequence [sequence omitted]

SEQ ID NO: 3018 - protein, 11 aa, Artificial sequence [sequence omitted]

SEQ ID NO: 3019 - protein, 11 aa, Artificial sequence [sequence omitted]

SEQ ID NO: 3020 - protein, 12 aa, Artificial sequence [sequence omitted]

SEQ ID NO: 3021 - protein, 12 aa, Artificial sequence [sequence omitted]

SEQ ID NO: 3022 - protein, 11 aa, Artificial sequence [sequence omitted]

SEQ ID NO: 3023 - protein, 13 aa, Artificial sequence [sequence omitted]

SEQ ID NO: 3024 - protein, 13 aa, Artificial sequence
  synthetic sequence
CHQSSTFGGSWTF

SEQ ID NO: 3025 - protein, 14 aa, Artificial sequence
  synthetic sequence
CCSYVGRDTLDWGF

SEQ ID NO: 3026 - protein, 11 aa, Artificial sequence
  synthetic sequence
CQQSYSSPWTI

SEQ ID NO: 3027 - protein, 12 aa, Artificial sequence [sequence omitted]

SEQ ID NO: 3028 - protein, 13 aa, Artificial sequence
  synthetic sequence
CQSYDTSNPYWVF

SEQ ID NO: 3029 - protein, 13 aa, Artificial sequence
  synthetic sequence
CQQYVSSPPRITF

SEQ ID NO: 3030 - protein, 11 aa, Artificial sequence
  synthetic sequence
CQQYTNWLVTF

SEQ ID NO: 3031 - protein, 11 aa, Artificial sequence
  synthetic sequence
CMIWPSHEGVF

SEQ ID NO: 3032 - protein, 13 aa, Artificial sequence
  synthetic sequence
CQVWDTSSEHYVF

SEQ ID NO: 3033 - protein, 11 aa, Artificial sequence [sequence omitted]

SEQ ID NO: 3034 - protein, 11 aa, Artificial sequence
  synthetic sequence
CQQFYSFPVTF

SEQ ID NO: 3035 - protein, 11 aa, Artificial sequence
  synthetic sequence
CQQYGSTTFTF

SEQ ID NO: 3036 - protein, 10 aa, Artificial sequence
  synthetic sequence
CMHALQTPGF

SEQ ID NO: 3037 - protein, 11 aa, Artificial sequence
  synthetic sequence
CLQHNTYPPFF

SEQ ID NO: 3038 - protein, 11 aa, Artificial sequence [sequence omitted]

SEQ ID NO: 3039 - protein, 14 aa, Artificial sequence
  synthetic sequence
CQSSDSSLSGSKVF

SEQ ID NO: 3040 - protein, 11 aa, Artificial sequence
  synthetic sequence
CQQYGSTSFTF

SEQ ID NO: 3041 - protein, 12 aa, Artificial sequence [sequence omitted]

SEQ ID NO: 3042 - protein, 13 aa, Artificial sequence
  synthetic sequence
CQVWDTSSEHFVF

SEQ ID NO: 3043 - protein, 11 aa, Artificial sequence [sequence omitted]

SEQ ID NO: 3044 - protein, 13 aa, Artificial sequence [sequence omitted]

SEQ ID NO: 3045 - protein, 12 aa, Artificial sequence
  synthetic sequence
CQQSHSALMYSF

SEQ ID NO: 3046 - protein, 13 aa, Artificial sequence
  synthetic sequence
CQQYNNWPSPWTF

SEQ ID NO: 3047 - protein, 11 aa, Artificial sequence
  synthetic sequence
CQQYEDVPITF

SEQ ID NO: 3048 - protein, 10 aa, Artificial sequence [sequence omitted]

SEQ ID NO: 3049 - protein, 12 aa, Artificial sequence [sequence omitted]

SEQ ID NO: 3050 - protein, 11 aa, Artificial sequence
  synthetic sequence
CQQYDNWPLAF

SEQ ID NO: 3051 - protein, 12 aa, Artificial sequence
  synthetic sequence
CSSYTITSTRVF

SEQ ID NO: 3052 - protein, 10 aa, Artificial sequence
  synthetic sequence
CQQYSYSHTF

SEQ ID NO: 3053 - protein, 13 aa, Artificial sequence
  synthetic sequence
CQVWDSSSDHPVL

SEQ ID NO: 3054 - protein, 11 aa, Artificial sequence [sequence omitted]

SEQ ID NO: 3055 - protein, 9 aa, Artificial sequence [sequence omitted]

SEQ ID NO: 3056 - protein, 11 aa, Artificial sequence [sequence omitted]

SEQ ID NO: 3057 - protein, 13 aa, Artificial sequence
  synthetic sequence
CQSYDRSLNGWVL

SEQ ID NO: 3058 - protein, 14 aa, Artificial sequence
  synthetic sequence
CQSFDSSVSDSAVF

SEQ ID NO: 3059 - protein, 13 aa, Artificial sequence
  synthetic sequence
CQTWGTGTQGWVF

SEQ ID NO: 3060 - protein, 11 aa, Artificial sequence [sequence omitted]

SEQ ID NO: 3061 - protein, 11 aa, Artificial sequence [sequence omitted]

SEQ ID NO: 3062 - protein, 11 aa, Artificial sequence
  synthetic sequence
CQQYNSDSVRF

SEQ ID NO: 3063 - protein, 11 aa, Artificial sequence
  synthetic sequence
CQTWGTGGGVF

SEQ ID NO: 3064 - protein, 11 aa, Artificial sequence
  synthetic sequence
CQHSYNAPYTF

SEQ ID NO: 3065 - protein, 13 aa, Artificial sequence [sequence omitted]

SEQ ID NO: 3066 - protein, 14 aa, Artificial sequence
  synthetic sequence
CQQRSNWPPFTWTF

SEQ ID NO: 3067 - protein, 11 aa, Artificial sequence
  synthetic sequence
CQQCGTSPWTF

SEQ ID NO: 3068 - protein, 11 aa, Artificial sequence [sequence omitted]

SEQ ID NO: 3069 - protein, 10 aa, Artificial sequence [sequence omitted]

SEQ ID NO: 3070 - protein, 11 aa, Artificial sequence [sequence omitted]

SEQ ID NO: 3071 - protein, 14 aa, Artificial sequence
  synthetic sequence
CQSSDSSLSDSKVF

SEQ ID NO: 3072 - protein, 13 aa, Artificial sequence [sequence omitted]

SEQ ID NO: 3073 - protein, 11 aa, Artificial sequence [sequence omitted]

SEQ ID NO: 3074 - protein, 10 aa, Artificial sequence [sequence omitted]

SEQ ID NO: 3075 - protein, 12 aa, Artificial sequence
  synthetic sequence
CQSYDSSTLTVF

SEQ ID NO: 3076 - protein, 13 aa, Artificial sequence
  synthetic sequence
CQTWGTGIQGWVF

SEQ ID NO: 3077 - protein, 12 aa, Artificial sequence [sequence omitted]

SEQ ID NO: 3078 - protein, 12 aa, Artificial sequence [sequence omitted]

SEQ ID NO: 3079 - protein, 13 aa, Artificial sequence [sequence omitted]

SEQ ID NO: 3080 - protein, 13 aa, Artificial sequence
  synthetic sequence
CQVWDTGSEHYVF

SEQ ID NO: 3081 - protein, 12 aa, Artificial sequence [sequence omitted]

SEQ ID NO: 3082 - protein, 13 aa, Artificial sequence
  synthetic sequence
CCSYAGPPTLYVF

SEQ ID NO: 3083 - protein, 13 aa, Artificial sequence [sequence omitted]

SEQ ID NO: 3084 - protein, 12 aa, Artificial sequence [sequence omitted]

SEQ ID NO: 3085 - protein, 11 aa, Artificial sequence [sequence omitted]

SEQ ID NO: 3086 - protein, 13 aa, Artificial sequence
  synthetic sequence
CLLYHGDAQLWVF

SEQ ID NO: 3087 - protein, 11 aa, Artificial sequence [sequence omitted]

SEQ ID NO: 3088 - protein, 13 aa, Artificial sequence [sequence omitted]

SEQ ID NO: 3089 - protein, 11 aa, Artificial sequence [sequence omitted]

SEQ ID NO: 3090 - protein, 12 aa, Artificial sequence
  synthetic sequence
CVLYMSSGFWVF

SEQ ID NO: 3091 - protein, 11 aa, Artificial sequence [sequence omitted]

SEQ ID NO: 3092 - protein, 11 aa, Artificial sequence [sequence omitted]

SEQ ID NO: 3093 - protein, 11 aa, Artificial sequence
  synthetic sequence
CQAWDVNTEVF

SEQ ID NO: 3094 - protein, 11 aa, Artificial sequence
  synthetic sequence
CQSYDSSNLLF

SEQ ID NO: 3095 - protein, 12 aa, Artificial sequence
  synthetic sequence
CLLSYSGADWVF

SEQ ID NO: 3096 - protein, 13 aa, Artificial sequence
  synthetic sequence
CYSTDSSGNPRGF

SEQ ID NO: 3097 - protein, 12 aa, Artificial sequence
  synthetic sequence
CSLYYSGGVCVF

SEQ ID NO: 3098 - protein, 11 aa, Artificial sequence [sequence omitted]

SEQ ID NO: 3099 - protein, 12 aa, Artificial sequence
  synthetic sequence
CQSVDNSGIYVF

SEQ ID NO: 3100 - protein, 11 aa, Artificial sequence
  synthetic sequence
CQHSYIAPYTF

SEQ ID NO: 3101 - protein, 11 aa, Artificial sequence [sequence omitted]

SEQ ID NO: 3102 - protein, 12 aa, Artificial sequence
  synthetic sequence
CTSFTTFTTWVF

SEQ ID NO: 3103 - protein, 11 aa, Artificial sequence
  synthetic sequence
CQQYGRSPSTF

SEQ ID NO: 3104 - protein, 13 aa, Artificial sequence
  synthetic sequence
GQVWDTSSEHYVF

SEQ ID NO: 3105 - protein, 13 aa, Artificial sequence [sequence omitted]

SEQ ID NO: 3106 - protein, 13 aa, Artificial sequence
  synthetic sequence
CYSTDSSGNPCGF

SEQ ID NO: 3107 - protein, 10 aa, Artificial sequence [sequence omitted]

SEQ ID NO: 3108 - protein, 11 aa, Artificial sequence
  synthetic sequence
CQQYFGSSLTF

SEQ ID NO: 3109 - protein, 13 aa, Artificial sequence
  synthetic sequence
CVSYSSGPSPWVF

SEQ ID NO: 3110 - protein, 11 aa, Artificial sequence
  synthetic sequence
CQQFRTFIWTF

SEQ ID NO: 3111 - protein, 11 aa, Artificial sequence [sequence omitted]

SEQ ID NO: 3112 - protein, 12 aa, Artificial sequence
  synthetic sequence
CQQRSNWPLYSF

SEQ ID NO: 3113 - protein, 11 aa, Artificial sequence [sequence omitted]

SEQ ID NO: 3114 - protein, 11 aa, Artificial sequence [sequence omitted]

SEQ ID NO: 3115 - protein, 14 aa, Artificial sequence [sequence omitted]

SEQ ID NO: 3116 - protein, 12 aa, Artificial sequence [sequence omitted]

SEQ ID NO: 3117 - protein, 11 aa, Artificial sequence [sequence omitted]

SEQ ID NO: 3118 - protein, 11 aa, Artificial sequence [sequence omitted]

SEQ ID NO: 3119 - protein, 12 aa, Artificial sequence [sequence omitted]

SEQ ID NO: 3120 - protein, 11 aa, Artificial sequence [sequence omitted]

SEQ ID NO: 3121 - protein, 11 aa, Artificial sequence [sequence omitted]

SEQ ID NO: 3122 - protein, 11 aa, Artificial sequence
  synthetic sequence
CLQDYAYPYTF

SEQ ID NO: 3123 - protein, 15 aa, Artificial sequence
  synthetic sequence
CQQANSFPPRAAYTF

SEQ ID NO: 3124 - protein, 11 aa, Artificial sequence [sequence omitted]

SEQ ID NO: 3125 - protein, 11 aa, Artificial sequence [sequence omitted]

SEQ ID NO: 3126 - protein, 11 aa, Artificial sequence [sequence omitted]

SEQ ID NO: 3127 - protein, 11 aa, Artificial sequence [sequence omitted]

SEQ ID NO: 3128 - protein, 11 aa, Artificial sequence
  synthetic sequence
CQHYHGYPITF

SEQ ID NO: 3129 - protein, 11 aa, Artificial sequence [sequence omitted]

SEQ ID NO: 3130 - protein, 13 aa, Artificial sequence [sequence omitted]

SEQ ID NO: 3131 - protein, 11 aa, Artificial sequence
  synthetic sequence
CQQYSSYFFTF

SEQ ID NO: 3132 - protein, 12 aa, Artificial sequence
  synthetic sequence
CQVWDSSTEEVF

SEQ ID NO: 3133 - protein, 10 aa, Artificial sequence
  synthetic sequence
CMQALLTYTF

SEQ ID NO: 3134 - protein, 11 aa, Artificial sequence [sequence omitted]

SEQ ID NO: 3135 - protein, 11 aa, Artificial sequence [sequence omitted]

SEQ ID NO: 3136 - protein, 11 aa, Artificial sequence [sequence omitted]

SEQ ID NO: 3137 - protein, 11 aa, Artificial sequence
  synthetic sequence
CQQYQSIPLTF

SEQ ID NO: 3138 - protein, 7 aa, Artificial sequence [sequence omitted]

SEQ ID NO: 3139 - protein, 11 aa, Artificial sequence [sequence omitted]

SEQ ID NO: 3140 - protein, 9 aa, Artificial sequence
  synthetic sequence
CATWDDSLS

SEQ ID NO: 3141 - protein, 11 aa, Artificial sequence [sequence omitted]

SEQ ID NO: 3142 - protein, 13 aa, Artificial sequence
  synthetic sequence
CQQRSNWPPSTTF

SEQ ID NO: 3143 - protein, 11 aa, Artificial sequence [sequence omitted]

SEQ ID NO: 3144 - protein, 12 aa, Artificial sequence
  synthetic sequence
CQQGHTFPPLTF

SEQ ID NO: 3145 - protein, 11 aa, Artificial sequence [sequence omitted]

SEQ ID NO: 3146 - protein, 11 aa, Artificial sequence [sequence omitted]

SEQ ID NO: 3147 - protein, 12 aa, Artificial sequence
  synthetic sequence
CQQYDSWPPWAF

SEQ ID NO: 3148 - protein, 11 aa, Artificial sequence
  synthetic sequence
CQQYNSYPWTF

SEQ ID NO: 3149 - protein, 11 aa, Artificial sequence [sequence omitted]

SEQ ID NO: 3150 - protein, 11 aa, Artificial sequence [sequence omitted]

SEQ ID NO: 3151 - protein, 11 aa, Artificial sequence [sequence omitted]

SEQ ID NO: 3152 - protein, 12 aa, Artificial sequence [sequence omitted]

SEQ ID NO: 3153 - protein, 11 aa, Artificial sequence [sequence omitted]

SEQ ID NO: 3154 - protein, 11 aa, Artificial sequence [sequence omitted]

SEQ ID NO: 3155 - protein, 10 aa, Artificial sequence [sequence omitted]

SEQ ID NO: 3156 - protein, 14 aa, Artificial sequence
  synthetic sequence
CQQRTNWPPRTLTF

SEQ ID NO: 3157 - protein, 11 aa, Artificial sequence [sequence omitted]

SEQ ID NO: 3158 - protein, 12 aa, Artificial sequence [sequence omitted]

SEQ ID NO: 3159 - protein, 11 aa, Artificial sequence [sequence omitted]

SEQ ID NO: 3160 - protein, 12 aa, Artificial sequence [sequence omitted]

SEQ ID NO: 3161 - protein, 11 aa, Artificial sequence [sequence omitted]

SEQ ID NO: 3162 - protein, 11 aa, Artificial sequence
  synthetic sequence
CQQYHGSPRTF

SEQ ID NO: 3163 - protein, 10 aa, Artificial sequence
  synthetic sequence
CQQRHNWVTF

SEQ ID NO: 3164 - protein, 12 aa, Artificial sequence [sequence omitted]

SEQ ID NO: 3165 - protein, 11 aa, Artificial sequence [sequence omitted]

SEQ ID NO: 3166 - protein, 14 aa, Artificial sequence
  synthetic sequence
CQVWDTIIDPYVVF

SEQ ID NO: 3167 - protein, 13 aa, Artificial sequence [sequence omitted]

SEQ ID NO: 3168 - protein, 11 aa, Artificial sequence [sequence omitted]

SEQ ID NO: 3169 - protein, 11 aa, Artificial sequence [sequence omitted]

SEQ ID NO: 3170 - protein, 11 aa, Artificial sequence [sequence omitted]

SEQ ID NO: 3171 - protein, 12 aa, Artificial sequence
  synthetic sequence
CHVWDSSTEEVF

SEQ ID NO: 3172 - protein, 11 aa, Artificial sequence [sequence omitted]

SEQ ID NO: 3173 - protein, 13 aa, Artificial sequence
  synthetic sequence
CQLWDTFSDHFVF

SEQ ID NO: 3174 - protein, 12 aa, Artificial sequence [sequence omitted]

SEQ ID NO: 3175 - protein, 8 aa, Artificial sequence
  synthetic sequence
CNSFGGLF

SEQ ID NO: 3176 - protein, 11 aa, Artificial sequence [sequence omitted]

SEQ ID NO: 3177 - protein, 10 aa, Artificial sequence
  synthetic sequence
CQQFDHLYTF

SEQ ID NO: 3178 - protein, 11 aa, Artificial sequence [sequence omitted]

SEQ ID NO: 3179 - protein, 10 aa, Artificial sequence
  synthetic sequence
CQQYYSLHSF

SEQ ID NO: 3180 - protein, 11 aa, Artificial sequence [sequence omitted]

SEQ ID NO: 3181 - protein, 11 aa, Artificial sequence [sequence omitted]

SEQ ID NO: 3182 - protein, 11 aa, Artificial sequence [sequence omitted]

SEQ ID NO: 3183 - protein, 11 aa, Artificial sequence
  synthetic sequence
CQQYFSSPHTF

SEQ ID NO: 3184 - protein, 13 aa, Artificial sequence [sequence omitted]

SEQ ID NO: 3185 - protein, 11 aa, Artificial sequence [sequence omitted]

SEQ ID NO: 3186 - protein, 11 aa, Artificial sequence [sequence omitted]

SEQ ID NO: 3187 - protein, 11 aa, Artificial sequence [sequence omitted]

SEQ ID NO: 3188 - protein, 10 aa, Artificial sequence [sequence omitted]

SEQ ID NO: 3189 - protein, 11 aa, Artificial sequence [sequence omitted]

SEQ ID NO: 3190 - protein, 11 aa, Artificial sequence [sequence omitted]

SEQ ID NO: 3191 - protein, 11 aa, Artificial sequence
  synthetic sequence
CHQTYSPPQTF

SEQ ID NO: 3192 - protein, 11 aa, Artificial sequence
  synthetic sequence
CQQYNTWPLAF

SEQ ID NO: 3193 - protein, 11 aa, Artificial sequence [sequence omitted]

SEQ ID NO: 3194 - protein, 11 aa, Artificial sequence [sequence omitted]

SEQ ID NO: 3195 - protein, 11 aa, Artificial sequence [sequence omitted]

SEQ ID NO: 3196 - protein, 11 aa, Artificial sequence [sequence omitted]

SEQ ID NO: 3197 - protein, 11 aa, Artificial sequence
  synthetic sequence
CMQSTQLLGTF

SEQ ID NO: 3198 - protein, 11 aa, Artificial sequence [sequence omitted]

SEQ ID NO: 3199 - protein, 12 aa, Artificial sequence [sequence omitted]

SEQ ID NO: 3200 - protein, 12 aa, Artificial sequence [sequence omitted]

SEQ ID NO: 3201 - protein, 13 aa, Artificial sequence [sequence omitted]

SEQ ID NO: 3202 - protein, 12 aa, Artificial sequence [sequence omitted]

SEQ ID NO: 3203 - protein, 10 aa, Artificial sequence
  synthetic sequence
CQQNYIIRTF

SEQ ID NO: 3204 - protein, 11 aa, Artificial sequence
  synthetic sequence
CQQAYSNSRTF

SEQ ID NO: 3205 - protein, 12 aa, Artificial sequence
  synthetic sequence
CQQYNYWPKFTF

SEQ ID NO: 3206 - protein, 11 aa, Artificial sequence [sequence omitted]

SEQ ID NO: 3207 - protein, 11 aa, Artificial sequence [sequence omitted]

SEQ ID NO: 3208 - protein, 13 aa, Artificial sequence
  synthetic sequence
CQQYSSSPPPLTF

SEQ ID NO: 3209 - protein, 11 aa, Artificial sequence [sequence omitted]

SEQ ID NO: 3210 - protein, 12 aa, Artificial sequence
  synthetic sequence
CQVYGTSPTFTF

SEQ ID NO: 3211 - protein, 11 aa, Artificial sequence [sequence omitted]

SEQ ID NO: 3212 - protein, 11 aa, Artificial sequence [sequence omitted]

SEQ ID NO: 3213 - protein, 11 aa, Artificial sequence [sequence omitted]

SEQ ID NO: 3214 - protein, 11 aa, Artificial sequence
  synthetic sequence
CQQYDHWPTTF

SEQ ID NO: 3215 - protein, 12 aa, Artificial sequence [sequence omitted]

SEQ ID NO: 3216 - protein, 12 aa, Artificial sequence
  synthetic sequence
CMQGTQWPLYTF

SEQ ID NO: 3217 - protein, 13 aa, Artificial sequence
  synthetic sequence
CQHYNDWPLRDTF

SEQ ID NO: 3218 - protein, 11 aa, Artificial sequence [sequence omitted]

SEQ ID NO: 3219 - protein, 12 aa, Artificial sequence
  synthetic sequence
CCSYTGRSSWVF

SEQ ID NO: 3220 - protein, 12 aa, Artificial sequence [sequence omitted]

SEQ ID NO: 3221 - protein, 11 aa, Artificial sequence [sequence omitted]

SEQ ID NO: 3222 - protein, 13 aa, Artificial sequence [sequence omitted]

SEQ ID NO: 3223 - protein, 11 aa, Artificial sequence [sequence omitted]

SEQ ID NO: 3224 - protein, 11 aa, Artificial sequence
  synthetic sequence
CQQYFNSPVTF

SEQ ID NO: 3225 - protein, 12 aa, Artificial sequence [sequence omitted]

SEQ ID NO: 3226 - protein, 11 aa, Artificial sequence [sequence omitted]

SEQ ID NO: 3227 - protein, 11 aa, Artificial sequence [sequence omitted]

SEQ ID NO: 3228 - protein, 10 aa, Artificial sequence
  synthetic sequence
CQQYDHFLTF

SEQ ID NO: 3229 - protein, 11 aa, Artificial sequence [sequence omitted]

SEQ ID NO: 3230 - protein, 11 aa, Artificial sequence
  synthetic sequence
CMQAVQSPPTF

SEQ ID NO: 3231 - protein, 11 aa, Artificial sequence [sequence omitted]

SEQ ID NO: 3232 - protein, 11 aa, Artificial sequence [sequence omitted]

SEQ ID NO: 3233 - protein, 14 aa, Artificial sequence
  synthetic sequence
CNSRDSNDNHLTVF

SEQ ID NO: 3234 - protein, 10 aa, Artificial sequence
  synthetic sequence
CQQRLNWLTF

SEQ ID NO: 3235 - protein, 11 aa, Artificial sequence [sequence omitted]

SEQ ID NO: 3236 - protein, 11 aa, Artificial sequence [sequence omitted]

SEQ ID NO: 3237 - protein, 12 aa, Artificial sequence [sequence omitted]

SEQ ID NO: 3238 - protein, 13 aa, Artificial sequence [sequence omitted]

SEQ ID NO: 3239 - protein, 11 aa, Artificial sequence [sequence omitted]

SEQ ID NO: 3240 - protein, 11 aa, Artificial sequence
  synthetic sequence
CQHYDNYWWTF

SEQ ID NO: 3241 - protein, 11 aa, Artificial sequence [sequence omitted]

SEQ ID NO: 3242 - protein, 12 aa, Artificial sequence [sequence omitted]

SEQ ID NO: 3243 - protein, 11 aa, Artificial sequence
  synthetic sequence
CQKYNNALLTF

SEQ ID NO: 3244 - protein, 11 aa, Artificial sequence
  synthetic sequence
CQQYYSNPITF

SEQ ID NO: 3245 - protein, 11 aa, Artificial sequence [sequence omitted]

SEQ ID NO: 3246 - protein, 11 aa, Artificial sequence [sequence omitted]

SEQ ID NO: 3247 - protein, 12 aa, Artificial sequence
  synthetic sequence
CQQSYSSLPFTF

SEQ ID NO: 3248 - protein, 10 aa, Artificial sequence [sequence omitted]

SEQ ID NO: 3249 - protein, 11 aa, Artificial sequence
  synthetic sequence
CHQYYSVPRTF

SEQ ID NO: 3250 - protein, 11 aa, Artificial sequence
  synthetic sequence
CQHFHSLPYTF

SEQ ID NO: 3251 - protein, 12 aa, Artificial sequence [sequence omitted]

SEQ ID NO: 3252 - protein, 11 aa, Artificial sequence [sequence omitted]

SEQ ID NO: 3253 - protein, 11 aa, Artificial sequence [sequence omitted]

SEQ ID NO: 3254 - protein, 11 aa, Artificial sequence
  synthetic sequence
CMQTIHWPWTF

SEQ ID NO: 3255 - protein, 11 aa, Artificial sequence [sequence omitted]

SEQ ID NO: 3256 - protein, 10 aa, Artificial sequence [sequence omitted]

SEQ ID NO: 3257 - protein, 11 aa, Artificial sequence [sequence omitted]

SEQ ID NO: 3258 - protein, 11 aa, Artificial sequence [sequence omitted]

SEQ ID NO: 3259 - protein, 11 aa, Artificial sequence [sequence omitted]

SEQ ID NO: 3260 - protein, 13 aa, Artificial sequence
  synthetic sequence
CASWDDSVNGPSF

SEQ ID NO: 3261 - protein, 12 aa, Artificial sequence
  synthetic sequence
CLQYDPSPPWTF

SEQ ID NO: 3262 - protein, 11 aa, Artificial sequence
  synthetic sequence
CQQSFSTLKTF

SEQ ID NO: 3263 - protein, 13 aa, Artificial sequence
  synthetic sequence
CWSYTSSATCAIR

SEQ ID NO: 3264 - protein, 12 aa, Artificial sequence [sequence omitted]

SEQ ID NO: 3265 - protein, 12 aa, Artificial sequence [sequence omitted]

SEQ ID NO: 3266 - protein, 10 aa, Artificial sequence
  synthetic sequence
CMQGKHLITF

SEQ ID NO: 3267 - protein, 12 aa, Artificial sequence [sequence omitted]

SEQ ID NO: 3268 - protein, 11 aa, Artificial sequence [sequence omitted]

SEQ ID NO: 3269 - protein, 12 aa, Artificial sequence [sequence omitted]

SEQ ID NO: 3270 - protein, 10 aa, Artificial sequence
  synthetic sequence
CQQSDHFLSF

SEQ ID NO: 3271 - protein, 12 aa, Artificial sequence [sequence omitted]

SEQ ID NO: 3272 - protein, 11 aa, Artificial sequence [sequence omitted]

SEQ ID NO: 3273 - protein, 11 aa, Artificial sequence [sequence omitted]

SEQ ID NO: 3274 - protein, 11 aa, Artificial sequence
  synthetic sequence
CQQYDIVPGAF

SEQ ID NO: 3275 - protein, 11 aa, Artificial sequence [sequence omitted]

SEQ ID NO: 3276 - protein, 11 aa, Artificial sequence
  synthetic sequence
CQQYASSPLAF

SEQ ID NO: 3277 - protein, 11 aa, Artificial sequence [sequence omitted]

SEQ ID NO: 3278 - protein, 10 aa, Artificial sequence
  synthetic sequence
CLQSKQLLTF

SEQ ID NO: 3279 - protein, 11 aa, Artificial sequence [sequence omitted]

SEQ ID NO: 3280 - protein, 13 aa, Artificial sequence
  synthetic sequence
CQQSYNTPRTRTF

SEQ ID NO: 3281 - protein, 11 aa, Artificial sequence [sequence omitted]

SEQ ID NO: 3282 - protein, 11 aa, Artificial sequence [sequence omitted]

SEQ ID NO: 3283 - protein, 11 aa, Artificial sequence [sequence omitted]

SEQ ID NO: 3284 - protein, 11 aa, Artificial sequence [sequence omitted]

SEQ ID NO: 3285 - protein, 12 aa, Artificial sequence [sequence omitted]

SEQ ID NO: 3286 - protein, 12 aa, Artificial sequence
  synthetic sequence
CQQYNTWIPYTF

SEQ ID NO: 3287 - protein, 13 aa, Artificial sequence
  synthetic sequence
CQQYNKWPRMYTF

SEQ ID NO: 3288 - protein, 13 aa, Artificial sequence [sequence omitted]

SEQ ID NO: 3289 - protein, 11 aa, Artificial sequence
  synthetic sequence
CMQALQNMYTF

SEQ ID NO: 3290 - protein, 11 aa, Artificial sequence
  synthetic sequence
CLLDFDGTRVF

SEQ ID NO: 3291 - protein, 11 aa, Artificial sequence [sequence omitted]

SEQ ID NO: 3292 - protein, 12 aa, Artificial sequence
  synthetic sequence
CQQRFNWPLFTF

SEQ ID NO: 3293 - protein, 11 aa, Artificial sequence [sequence omitted]

SEQ ID NO: 3294 - protein, 11 aa, Artificial sequence [sequence omitted]

SEQ ID NO: 3295 - protein, 11 aa, Artificial sequence [sequence omitted]

SEQ ID NO: 3296 - protein, 11 aa, Artificial sequence [sequence omitted]

SEQ ID NO: 3297 - protein, 12 aa, Artificial sequence [sequence omitted]

SEQ ID NO: 3298 - protein, 8 aa, Artificial sequence
  synthetic sequence
CMQASHCV

SEQ ID NO: 3299 - protein, 11 aa, Artificial sequence [sequence omitted]

SEQ ID NO: 3300 - protein, 11 aa, Artificial sequence [sequence omitted]

SEQ ID NO: 3301 - protein, 13 aa, Artificial sequence
  synthetic sequence
CVTGDDNLNSQVF

SEQ ID NO: 3302 - protein, 13 aa, Artificial sequence [sequence omitted]

SEQ ID NO: 3303 - protein, 12 aa, Artificial sequence [sequence omitted]

SEQ ID NO: 3304 - protein, 12 aa, Artificial sequence [sequence omitted]

SEQ ID NO: 3305 - protein, 11 aa, Artificial sequence
  synthetic sequence
CQQGYNTPPTF

SEQ ID NO: 3306 - protein, 11 aa, Artificial sequence
  synthetic sequence
CLQHNRYPPIF

SEQ ID NO: 3307 - protein, 11 aa, Artificial sequence
  synthetic sequence
CQQLTSYPWTF

SEQ ID NO: 3308 - protein, 11 aa, Artificial sequence
  synthetic sequence
CQSYDNSNKIF

SEQ ID NO: 3309 - protein, 13 aa, Artificial sequence
  synthetic sequence
CQAWDTSAAWGVF

SEQ ID NO: 3310 - protein, 10 aa, Artificial sequence [sequence omitted]

SEQ ID NO: 3311 - protein, 11 aa, Artificial sequence
  synthetic sequence
CQQYNNWTPHF

SEQ ID NO: 3312 - protein, 11 aa, Artificial sequence [sequence omitted]

SEQ ID NO: 3313 - protein, 12 aa, Artificial sequence [sequence omitted]

SEQ ID NO: 3314 - protein, 12 aa, Artificial sequence
  synthetic sequence
CQQYYSIVPDTF

SEQ ID NO: 3315 - protein, 11 aa, Artificial sequence
  synthetic sequence
CQQSYSNTWTF

SEQ ID NO: 3316 - protein, 12 aa, Artificial sequence
  synthetic sequence
CCSCASRATNVY

SEQ ID NO: 3317 - protein, 12 aa, Artificial sequence [sequence omitted]

SEQ ID NO: 3318 - protein, 11 aa, Artificial sequence [sequence omitted]

SEQ ID NO: 3319 - protein, 11 aa, Artificial sequence
  synthetic sequence
CQQYNTYSSTF

SEQ ID NO: 3320 - protein, 13 aa, Artificial sequence [sequence omitted]

SEQ ID NO: 3321 - protein, 12 aa, Artificial sequence [sequence omitted]

SEQ ID NO: 3322 - protein, 9 aa, Artificial sequence
  synthetic sequence
CQQFGGSPG

SEQ ID NO: 3323 - protein, 11 aa, Artificial sequence [sequence omitted]

SEQ ID NO: 3324 - protein, 11 aa, Artificial sequence
  synthetic sequence
CQQYDKYPPTF

SEQ ID NO: 3325 - protein, 11 aa, Artificial sequence [sequence omitted]

SEQ ID NO: 3326 - protein, 10 aa, Artificial sequence
  synthetic sequence
CMQGLQKFTF

SEQ ID NO: 3327 - protein, 11 aa, Artificial sequence [sequence omitted]

SEQ ID NO: 3328 - protein, 11 aa, Artificial sequence [sequence omitted]

SEQ ID NO: 3329 - protein, 11 aa, Artificial sequence
  synthetic sequence
CQQYNNWPQTF

SEQ ID NO: 3330 - protein, 10 aa, Artificial sequence [sequence omitted]

SEQ ID NO: 3331 - protein, 13 aa, Artificial sequence [sequence omitted]

SEQ ID NO: 3332 - protein, 11 aa, Artificial sequence [sequence omitted]

SEQ ID NO: 3333 - protein, 13 aa, Artificial sequence [sequence omitted]

SEQ ID NO: 3334 - protein, 11 aa, Artificial sequence
  synthetic sequence
CHQYGSTPRTF

SEQ ID NO: 3335 - protein, 13 aa, Artificial sequence
  synthetic sequence
CQQYSNWPPRITF

SEQ ID NO: 3336 - protein, 11 aa, Artificial sequence
  synthetic sequence
CQQCDNLPHTF

SEQ ID NO: 3337 - protein, 416 aa, Homo sapiens
MKRERGALSRASRALRLAPFVYLLLIQTDPLEGVNITSPVRLIHGTVGKSALLSVQYSSTSSDRPVVKWQLKRDKPVTVVQSIGTEVIGTLRPDYRDRIRLFENGSLLLSDLQLADEGTYEVEISITDDTFTGEKTINLTVDVPISRPQVLVASTTVLELSEAFTLNCSHENGTKPSYTWLKDGKPLLNDSRMLLSPDQKVLTITRVLMEDDDLYSCMVENPISQGRSLPVKITVYRRSSLYIILSTGGIFLLVTLVTVCACWKPSKRKQKKLEKQNSLEYMDQNDDRLKPEADTLPRSGEQERKNPMALYILKDKDSPETEENPAPEPRSATEPGPPGYSVSPAVPGRSPGLPIRSARRYPRSPARSPATGRTHSSPPRAPSSPGRSRSASRTLRTAGVHIIREQDEAGPVEISA

SEQ ID NO: 3338 - protein, 641 aa, Epstein-Barr virus
MSDEGPGTGPGNGLGEKGDTSGPEGSGGSGPQRRGGDNHGRGRGRGRGRGGGRPGAPGGSGSGPRHRDGVRRPQKRPSCIGCKGTHGGTGAGAGAGGAGAGGAGAGGGAGAGGGAGGAGGAGGAGAGGGAGAGGGAGGAGGAGAGGGAGAGGGAGGAGAGGGAGGAGGAGAGGGAGAGGGAGGAGAGGGAGGAGGAGAGGGAGAGGAGGAGGAGAGGAGAGGGAGGAGGAGAGGAGAGGAGAGGAGAGGAGGAGAGGAGGAGAGGAGGAGAGGGAGGAGAGGGAGGAGAGGAGGAGAGGAGGAGAGGAGGAGAGGGAGAGGAGAGGGGRGRGGSGGRGRGGSGGRGRGGSGGRRGRGRERARGGSRERARGRGRGRGEKRPRSPSSQSSSSGSPPRRPPPGRRPFFHPVGEADYFEYHQEGGPDGEPDVPPGAIEQGPADDPGEGPSTGPRGQGDGGRRKKGGWFGKHRGQGGSNPKFENIAEGLRALLARSHVERTTDEGTWVAGVFVYGGSKTSLYNLRRGTALAIPQCRLTPLSRLPFGMAPGPGPQPGPLRESIVCYFMVFLQTHIFAEVLKDAIKDLVMTKPAPTCNIRVTVCSFDDGVDLPPWFPPMVEGAAAEGDDGDDGDEGGDGDEGEEGQE

SEQ ID NO: 3339 - protein, 19 aa, Homo sapiens
  SITE (7)..(8): The serine residues at positions 7 and 8 may or may not be phosphorylated
  SITE (14)..(15): The serine residues at positions 14 and 15 may or may not be phosphorylated
ATGRTHSSPPRAPSSPGSR

SEQ ID NO: 3340 - protein, 20 aa, Artificial sequence
  synthetic sequence
AQSSSSGSPPRRPPPGRRPF

SEQ ID NO: 3341 - protein, 20 aa, Artificial sequence
  synthetic sequence
SASSSSGSPPRRPPPGRRPF

SEQ ID NO: 3342 - protein, 20 aa, Artificial sequence
  synthetic sequence
SQASSSGSPPRRPPPGRRPF

SEQ ID NO: 3343 - protein, 20 aa, Artificial sequence
  synthetic sequence
SQSASSGSPPRRPPPGRRPF

SEQ ID NO: 3344 - protein, 20 aa, Artificial sequence
  synthetic sequence
SQSSASGSPPRRPPPGRRPF

SEQ ID NO: 3345 - protein, 20 aa, Artificial sequence
  synthetic sequence
SQSSSAGSPPRRPPPGRRPF

SEQ ID NO: 3346 - protein, 20 aa, Artificial sequence
  synthetic sequence
SQSSSSASPPRRPPPGRRPF

SEQ ID NO: 3347 - protein, 20 aa, Artificial sequence
  synthetic sequence
SQSSSSGAPPRRPPPGRRPF

SEQ ID NO: 3348 - protein, 20 aa, Artificial sequence
  synthetic sequence
SQSSSSGSAPRRPPPGRRPF

SEQ ID NO: 3349 - protein, 20 aa, Artificial sequence
  synthetic sequence
SQSSSSGSPARRPPPGRRPF

SEQ ID NO: 3350 - protein, 20 aa, Artificial sequence
  synthetic sequence
SQSSSSGSPPARPPPGRRPF

SEQ ID NO: 3351 - protein, 20 aa, Artificial sequence
  synthetic sequence
SQSSSSGSPPRAPPPGRRPF

SEQ ID NO: 3352 - protein, 20 aa, Artificial sequence
  synthetic sequence
SQSSSSGSPPRRAPPGRRPF

SEQ ID NO: 3353 - protein, 20 aa, Artificial sequence
  synthetic sequence
SQSSSSGSPPRRPAPGRRPF

SEQ ID NO: 3354 - protein, 20 aa, Artificial sequence
  synthetic sequence
SQSSSSGSPPRRPPAGRRPF

SEQ ID NO: 3355 - protein, 20 aa, Artificial sequence
  synthetic sequence
SQSSSSGSPPRRPPPARRPF

SEQ ID NO: 3356 - protein, 20 aa, Artificial sequence
  synthetic sequence
SQSSSSGSPPRRPPPGARPF

SEQ ID NO: 3357 - protein, 20 aa, Artificial sequence
  synthetic sequence
SQSSSSGSPPRRPPPGRAPF

SEQ ID NO: 3358 - protein, 20 aa, Artificial sequence
  synthetic sequence
SQSSSSGSPPRRPPPGRRAF

SEQ ID NO: 3359 - protein, 20 aa, Artificial sequence
  synthetic sequence
SQSSSSGSPPRRPPPGRRPA

SEQ ID NO: 3360 - protein, 116 aa, Artificial sequence
  synthetic sequence
QVQLVESGGGLVKPGGSLRLSCVSSGFTFSNYWMSWVRQAPGGGLEWVANINQDGSEKYYVDSVKGRFTSSRDNTKNSLFLQLNSLRAEDTGIYYCTRDPPYFDNWGQGTLVTVSS

SEQ ID NO: 3361 - protein, 116 aa, Artificial sequence
  synthetic sequence
EVQLVESGGGLVQPGGSLRLSCAASGFTFSSYWMSWVRQAPGKGLEWVANIKQDGSEKYYVDSVKGRFTISRDNAKNSLYLQMNSLRAEDTAVYYCARDPPYFDYWGQGTLVTVSS

SEQ ID NO: 3362 - protein, 112 aa, Artificial sequence
  synthetic sequence
DVVLTQSPLSLPVILGQPASISCRSSQSLVYSDGRTYLNWFQQRPGQSPRRLIYKISKRDSGVPERFSGSGSGTDFTLEISRVEAEDVGIYYCMQGSHWPVTFGQGTKVEIK

SEQ ID NO: 3363 - protein, 112 aa, Artificial sequence
  synthetic sequence
DVVMTQSPLSLPVTLGQPASISCRSSQSLVYSDGNTYLNWFQQRPGQSPRRLIYKVSNRDSGVPDRFSGSGSGTDFTLKISRVEAEDVGVYYCMQGTHVPVTFGQGTKVEIK

SEQ ID NO: 3364 - protein, 386 aa, Epstein-Barr Virus
MEHDLERGPPGPRRPPRGPPLSSSLGLALLLLLLALLFWLYIVMSDWTGGALLVLYSFALMLIIIILIIFIFRRDLLCPLGALCILLLMITLLLIALWNLHGQALFLGIVLFIFGCLLVLGIWIYLLEMLWRLGATIWQLLAFFLAFFLDLILLIIALYLQQNWWTLLVDLLWLLLFLAILIWMYYHGQRHSDEHHHDDSLPHPQQATDDSGHESDSNSNEGRHHLLVSGAGDGPPLCSQNLGAPGGGPDNGPQDPDNTDDNGPQDPDNTDDNGPHDPLPQDPDNTDDNGPQDPDNTDDNGPHDPLPHSPSDSAGNDGGPPQLTEEVENKGGDQGPPLMTDGGGGHSHDSGHGGGDPHLPTLLLGSSGSGGDDDDPHGPVQLSYYD

SEQ ID NO: 3365 - protein, 497 aa, Epstein-Barr Virus
MGSLEMVPMGAGPPSPGGDPDGYDGGNNSQYPSASGSSGNTPTPPNDEERESNEEPPPPYEDPYWGNGDRHSDYQPLGTQDQSLYLGLQHDGNDGLPPPPYSPRDDSSQHIYEEAGRGSMNPVCLPVIVAPYLFWLAAIAASCFTASVSTVVTATGLALSLLLLAAVASSYAAAQRKLLTPVTVLTAVVTFFAICLTWRIEDPPFNSLLFALLAAAGGLQGIYVLVMLVLLILAYRRRWRRLTVCGGIMFLACVLVLIVDAVLQLSPLLGAVTVVSMTLLLLAFVLWLSSPGGLGTLGAALLTLAAALALLASLILGTLNLTTMFLLMLLWTLVVLLICSSCSSCPLSKILLARLFLYALALLLLASALIAGGSILQTNFKSLSSTEFIPNLFCMLLLIVAGILFILAILTEWGSGNRTYGPVFMCLGGLLTMVAGAVWLTVMSNTLLSAWILTAGFLIFLIGFALFGVIRCCRYCCYYCLTLESEERPPTPYRNTV

SEQ ID NO: 3366 - protein, 295 aa, Epstein-Barr Virus
MTSVNATEDACTKSYSAFLSGMTSLLLVLLILLTLAGILFIIFVRKLVHRMDVWLIALLIELLLWVLGKMIQEFSSTGLCLLTQNMMFLGLMCSVWTHLGMALEKTLALFSRTPKRTSHRNVCLYLMGVFCLVLLLIIILLITMGPDANLNRGPNMCREGPTKGMHTAVQGLKAGCYLLAAVLIVLLTVIIIWKLLRTKFGRKPRLICNVTFTGLICAFSWFMLSLPLLFLGEAGSLGFDCTESLVARYYPGPAACLALLLIILYAWSFSHFMDSLKNQVTVTARYFRRVPSQST

1. A method for determining the presence of EBV-driven pathogenic B cells in an individual, the method comprising:
detecting in a biological sample EBV-infected B cells, and if EBV-infected B cells are detected treating said patient with an EBV-infected B cell depleting or inhibiting therapeutic.

2. The method of claim 1, wherein the individual suffers from an autoimmune disease, optionally multiple sclerosis, or a multiple sclerosis spectrum disorder; systemic lupus erythematosus; type I diabetes; rheumatoid arthritis; Sjogren's syndrome; or dermatomyositis.

3-4. (canceled)

5. The method of claim 1, wherein glialcam epitope is cross-reactive with an EBNA-1 epitope present in the EBV infected B cells.

6. The method of claim 5, wherein the epitope comprises one or both of EBNA-1 residues 386-405, and hepacam/glialcam residues 337-385.

7. The method of claim 1, wherein EBV-driven pathogenic B cells are detected by determining the presence of markers associated with active EBV infection in the B cells, wherein the markers are protein markers or mRNA markers.

8-9. (canceled)

10. The method of claim 7, wherein the markers comprise one or more of BILF-1, LMP1 and LMP2.

11. The method of claim 7, wherein detection of the markers associated with active EBV infection is used to monitor treatment response and guide additional treatment.

12. (canceled)

13. The method of claim 1, wherein the treatment comprises depletion of pathogenic B cells.

14. The method of claim 13, wherein the treatment comprises use of monoclonal antibodies targeting EBV LMP1, LMP2, BILF1 or a combination of these EBV proteins.

15. The method of claim 13, wherein the individual is treated with a depletion agent targeted to markers present on B cells actively infected with EBV.

16. The method of claim 15, wherein the targeted markers comprise EBV proteins: BILF-1, LMP1 and/or LMP2.

17. The method of claim 15, wherein the depletion agent is an antibody.

18. The method of claim 17, wherein the antibody is complexed with a cytotoxic agent.

19. The method of claim 13, wherein the treatment comprises inhibition of pathogenic B cells.

20. The method of claim 19, wherein the B cells are treated with a BTK inhibitor.

21. The method of claim 13, wherein the treatment comprises administration of an agent to tolerize immune cells to a cross-reactive EBNA-1/glialcam epitope.

22. The method of claim 21, wherein the agent is an altered peptide ligand.

23. The method of claim 21, wherein the agent is a DNA construct encoding the cross-reactive epitope.

24. The method of claim 22, wherein administration is oral, nasal, intradermal, transdermal or intramuscular.

25. An antibody specific for a glialcam epitope cross-reactive with an EBNA-1 epitope comprising a set of CDR sequences from the sequences provided in Table 3.
